(19) United States
(12) Patent Application Publication
(10) Pub. No.: US 2018/0148794 A1
(43) Pub. Date: May 31, 2018

(54) METHODS OF PROSTATE CANCER PROGNOSIS

(71) Applicant: KONINKLIJKE PHILIPS N.V., EINDHOVEN (NL)

(72) Inventors: RALF HOFFMANN, EINDHOVEN (NL); EVELINE DEN BIEZEN-TIMMERMANS, EINDHOVEN (NL); DIANNE ARNOLDINA MARGARETHA WILHELMINA VAN STRIJP, EINDHOVEN (NL); ANNE GODEFRIDA CATHARINA VAN BRUSSEL, EINDHOVEN (NL); MARCIA ALVES DE INDA, EINDHOVEN (NL); JANNEKE WROBEL, EINDHOVEN (NL)

(21) Appl. No.: 15/577,480

(22) PCT Filed: May 26, 2016
(86) PCT No.: PCT/EP2016/061885

§ 371 Date: Nov. 28, 2017

(30) Foreign Application Priority Data
May 29, 2015 (EP) 15169782.8

(51) Int. Cl. C12Q 1/6886

(52) U.S. Cl. CPC C12Q 1/6886; C12Q 2600/166; C12Q 2600/158; C12Q 2600/118

(57) ABSTRACT

The present invention pertains to methods for determining gene expression signatures for diagnosing patients with prostate cancer, e.g., to establish a prognosis for such patients, for determining the predisposition of said patient to develop aggressive or indolent disease, for example after primary treatment, and/or for identification and stratification of patients for available therapies. The invention also relates to products used in such methods, e.g. kits, software, and the like. The present invention further relates to therapies for use in the treatment of patients that have been diagnosed, identified, or stratified in any of the methods dis closed herein.

### FIELD OF THE INVENTION

[0001] The invention pertains to methods for determining gene expression signatures for diagnosing patients with prostate cancer, e.g., to establish a prognosis for such patients, for determining the predisposition of said patient to develop aggressive or indolent disease, for example after primary treatment, and/or for identification and stratification of patients for available therapies. The invention also relates to products used in such methods, e.g. kits, software, and the like. The invention further relates to therapies for use in the treatment of patients that have been diagnosed, identified, or stratified in any of the methods disclosed herein.

### BACKGROUND OF THE INVENTION

[0002] Cancer is a class of diseases in which a group of cells display uncontrolled growth, invasion and sometimes metastasis. These three malignant properties of cancers differentiate them from benign tumors, which are self-limited, do not invade or metastasize. Prostate Cancer (PCa) is the most commonly occurring non-skin malignancy in men, with estimated 900,000 new cases diagnosed world-wide in 2008. Due to ageing populations, the incidence of PCa will dramatically increase in the coming years. Routine diagnosis by determination of blood levels of the prostate-specific antigen (PSA), digital rectal exam (DRE) and transrectal ultrasound analysis (TRUS) leads to significant first-line over-diagnosis of non-cancerous, benign prostate conditions: of the approx. 1 million prostate biopsies annually performed in the U.S. alone to find about 250,000 new cases, about 75% are done unnecessarily, incurring both substantial complications (urosepsis, bleedings, urinary retention) in patients and total cost of >US$ 2 billion (˜US$ 2,100 per biopsy procedure). At least 4 out of 100 men with a negative biopsy are likely to be hospitalized due to side-effects and 9 out of 10,000 biopsied patients are at risk of dying from the currently used procedure.

[0003] Of the approximately 250,000 newly detected PCa cases in the U.S. per year, about 200,000 are initially characterized as localized disease, i.e. as cancer confined to the prostate organ. This condition is to a certain extent curable by primary treatment approaches, such as radiation therapy or, in particular, the partial or total removal of the prostate by surgery (prostatectomy). However, these interventions typically come with serious side effects, particularly urinary incontinence and/or erectile dysfunctions as very frequent consequences of prostatectomy. Up to 50% of men undergoing radical prostatectomy develop urinary incontinence. Studies have shown that, one year after surgery, between 15% and 50% of men still report such problems. Erection problems likewise are serious side effects of radical prostatectomy (RP). Only about half of the operated men are able to regain some of their ability to have erections. Furthermore, all routinely applied treatments for localized PCa are expensive (typically in the order of US$ 20-30,000) and incur total direct costs of US$ 5 billion in the U.S. each year.

[0004] Among the ˜200,000 men in the United States with clinically localized disease at diagnosis, up to 50% have very-low- or low-risk cancer. Accordingly, the NCCN (National Comprehensive Cancer Network) recently revised their PCa treatment guidelines to expand active surveillance (AS) as a gentle and convenient treatment alternative for patients with such low risk disease. By referring appropriate patients to AS, the quality of life for such patients is significantly improved as compared with men having undergone primary treatment and the 5-year cost for AS is reported to be less than US$ 10,000 per patient.

[0005] Moreover, in case surgery (vs. AS) is selected as the treatment of choice for a given patient, it is of significant advantage to stratify for the extent of surgery according to the potential aggressiveness of the patient's tumor. For instance, nerve-sparing operation techniques could be more generally applied for men with predicted low-risk disease to minimize potency-related adverse effects of radical prostatectomy. Likewise, according to the European Association Of Urology (EAU)'s latest Prostate Cancer Guidelines, extended lymph node dissection is recommended in case of a predicted high-risk cancer despite the fact that the procedure is complex, time-consuming and associated with higher complication rates as compared with more limited procedures. Consequently, while less limited lymph node dissection has shown to miss about 50% of lymph node metastases, the management of men with localized prostate cancer requires highly accurate pre-surgical predictions of the aggressiveness potential of an individual tumor to provide most optimal care for each patient.

[0006] US 2013/196321 A1 describes molecular assays, which comprise measurement of expression levels of one or more genes in a sample from a prostate cancer patient to provide information concerning the likelihood of a clinical outcome, identify risk classification and facilitate treatment decision making. The reference discloses a number of genes to be analyzed in such assays, which are normalized to e.g. a housekeeping gene. Furthermore, kits comprising gene-specific probes and/or primers to perform the assays and computer-based systems, algorithms and computer program products to perform the analysis of the expression levels are also disclosed.

[0007] The article “DYRK2 controls the epithelial-mesenchymal transition in breast cancer by degrading Snail” by Mimoto Rei et al. in Cancer Letters (2013), Volume 339, Number 2, pages 214-225, discloses that DYRK2 is down regulated in human breast cancer tissue and that patients with low DYRK2-expressing tumors have a worse outcome than those with high SYRK2-expressing tumors. The authors conclude that DYRK2 is a potential prognostic marker for breast cancer and additionally mention, that it has been demonstrated that DYRK2 has also been found to be down-regulated in lung, colon and prostate cancers.

[0008] WO 2010/131194 A1 relates to PDE4D7 as a marker for malignant hormone sensitive prostate cancer and discloses a method for diagnosing, detecting, monitoring and prognosticating malignant, hormone sensitive prostate cancer comprising the step of determining the level of PDE4D7. In addition, methods for identifying an individual for eligibility for certain cancer therapy are described as well as a composition for carrying out the method, comprising oligonucleotides or probes specific for the PDE4D7 expression product.

[0009] WO 2014/153442 A2 discloses methods for diagnosis, prognosis and treatment of ovarian cancer which involve the determination of the expression levels of certain marker genes. The expression levels are converted into an index, wherein the genes are weighted equally with the expression levels of down-regulated genes subtracted from the ones of up-regulated genes.

### SUMMARY OF THE INVENTION

[0010] The present invention relates to the identification and use of gene expression profiles, signatures, or patterns of biomarker genes of interest (also referred to as marker genes) with clinical relevance to prostate cancer. In particular, the invention is based on the gene expression analysis of nucleic acids, preferably transcripts of biomarker genes, obtained from biological samples and the identification of biomarker genes that are correlated with aggressive and indolent disease, patient survival and prostate cancer recurrence. Expression analysis of these marker genes can be used in providing a Prostate Cancer Progression Index (PCPI) that can be used in the classification of patients into those with an aggressive and indolent disease and with corresponding poor or good prognosis.

[0011] Further, the PCPI can also be used to predict the progression of disease in previously clinically diagnosed and treated subjects and to stratify the patients according to their individual PCPI. Therefore, the PCPI provides a very helpful parameter for personalized medicine relating to the diagnosis, prognosis and treatment of prostate cancer patients. The PCPI may be used alone or in combination with other means and methods that provide information on the patients' personal disease status or disease stage.

[0012] Physicians and/or pathologists can advantageously use the PCPI to confirm results obtained in other methods for diagnosing, identifying, prognosticating, classifying, and/or stratifying patients, e.g. patients with a predisposition to develop aggressive versus indolent prostate cancer forms. The methods and means provided by the invention therefore help establish better diagnosis, prognosis, etc. to find the best treatment for a patient, and to avoid unnecessary surgery or other treatments that are dangerous due to side-effects, occasionally superfluous and result in enormous costs for the public health systems.

[0013] One aspect of the invention is directed to a method comprising:

[0014] determining a gene expression level for the signature genes: AZGP1, FBLN1, ILK, KRT15, MEIS2, MYBPC1, PAGE4, SRD5A2, COL1A1, COL3A1, COL5A2, INHBA, THBS2, VCAN, BGN, BIRC5, and DYRK2, and optionally PDE4 isoforms comprising PDE4D5 and/or PDE4D7, to obtain a subject expression profile for a subject.

[0015] In some embodiments, the method further comprises:

[0016] classifying the subject as prostate cancer-positive or prostate cancer-negative based on the subject expression profile; and/or

[0017] classifying the subject as having a good prognosis or a poor prognosis of prostate cancer based on the subject expression profile, wherein the good prognosis predicts an increased likelihood of survival within a predetermined period after initial diagnosis and/or no progression of disease after primary treatment, and the poor prognosis predicts an aggressive disease, a decreased likelihood of survival, an increased likelihood of biochemical recurrence, clinical recurrence, and/or the presence of local or distant metastases, within a predetermined period after initial diagnosis; and/or

[0018] classifying the subject as having or not having a predisposition of prostate cancer that is susceptible to disease progression based on the subject expression profile, wherein the predisposition predicts an aggressive disease, a decreased likelihood of survival, an increased likelihood of biochemical recurrence, clinical recurrence, and/or the presence of local or distant metastases, within a predetermined period after initial diagnosis.

[0019] In one embodiment, the method further comprises:

[0020] classifying the subject as prostate cancer-positive or prostate cancer-negative based on the subject expression profile; or

[0021] classifying the subject as having a good prognosis or a poor prognosis of prostate cancer based on the subject expression profile, wherein the good prognosis predicts an increased likelihood of survival within a predetermined period after initial diagnosis and/or no progression of disease after primary treatment, and the poor prognosis predicts an aggressive disease, a decreased likelihood of survival, an increased likelihood of biochemical recurrence, clinical recurrence, and/or the presence of local or distant metastases, within a predetermined period after initial diagnosis; or

[0022] classifying the subject as having or not having a predisposition of prostate cancer that is susceptible to disease progression based on the subject expression profile, wherein the predisposition predicts an aggressive disease, a decreased likelihood of survival, an increased likelihood of biochemical recurrence, clinical recurrence, and/or the presence of local or distant metastases, within a predetermined period after initial diagnosis.

[0023] In one embodiment, the method further comprises:

[0024] classifying the subject as prostate cancer-positive or prostate cancer-negative based on the subject expression profile; or

[0025] classifying the subject as having a good prognosis or a poor prognosis of prostate cancer based on the subject expression profile, wherein the good prognosis predicts an increased likelihood of survival within a predetermined period after initial diagnosis and/or no progression of disease after primary treatment, and the poor prognosis predicts an aggressive disease, a decreased likelihood of survival, an increased likelihood of biochemical recurrence, clinical recurrence, and/or the presence of local or distant metastases, within a predetermined period after initial diagnosis; and

[0026] classifying the subject as having or not having a predisposition of prostate cancer that is susceptible to disease progression based on the subject expression profile, wherein the predisposition predicts an aggressive disease, a decreased likelihood of survival, an increased likelihood of biochemical recurrence, clinical recurrence, and/or the presence of local or distant metastases, within a predetermined period after initial diagnosis. In one embodiment, the method further comprises:

[0027] classifying the subject as prostate cancer-positive or prostate cancer-negative based on the subject expression profile; and

[0028] classifying the subject as having a good prognosis or a poor prognosis of prostate cancer based on the subject expression profile, wherein the good prognosis predicts an increased likelihood of survival within a predetermined period after initial diagnosis and/or no progression of disease after primary treatment, and the poor prognosis predicts an aggressive disease, a decreased likelihood of survival, an increased likelihood of biochemical recurrence, clinical recurrence, and/or the presence of local or distant metastases, within a predetermined period after initial diagnosis; or

[0029] classifying the subject as having or not having a predisposition of prostate cancer that is susceptible to disease progression based on the subject expression profile, wherein the predisposition predicts an aggressive disease, a decreased likelihood of survival, an increased likelihood of biochemical recurrence, clinical recurrence, and/or the presence of local or distant metastases, within a predetermined period after initial diagnosis.

[0030] In one embodiment, the method further comprises:

[0031] classifying the subject as prostate cancer-positive or prostate cancer-negative based on the subject expression profile; and

[0032] classifying the subject as having a good prognosis or a poor prognosis of prostate cancer based on the subject expression profile, wherein the good prognosis predicts an increased likelihood of survival within a predetermined period after initial diagnosis and/or no progression of disease after primary treatment, and the poor prognosis predicts an aggressive disease, a decreased likelihood of survival, an increased likelihood of biochemical recurrence, clinical recurrence, and/or the presence of local or distant metastases, within a predetermined period after initial diagnosis; and

[0033] classifying the subject as having or not having a predisposition of prostate cancer that is susceptible to disease progression based on the subject expression profile, wherein the predisposition predicts an aggressive disease, a decreased likelihood of survival, an increased likelihood of biochemical recurrence, clinical recurrence, and/or the presence of local or distant metastases, within a predetermined period after initial diagnosis.

[0034] Another aspect of the invention is directed to a method comprising:

[0035] classifying a subject as prostate cancer-positive or prostate cancer-negative based on a subject expression profile for the subject, wherein the subject expression profile includes the gene expression level of the signature genes: AZGP1, FBLN1, ILK, KRT15, MEIS2, MYBPC1, PAGE4, SRD5A2, COL1A1, COL3A1, COL5A2, INHBA, THBS2, VCAN, BGN, BIRC5, and DYRK2, and optionally PDE4 isoforms comprising PDE4D5 and/or PDE4D7; and/or

[0036] classifying a subject as having a good prognosis or a poor prognosis based on a subject expression profile for the subject, wherein the subject expression profile includes the gene expression level of the signature genes: AZGP1, FBLN1, ILK, KRT15, MEIS2, MYBPC1, PAGE4, SRD5A2, COL1A1, COL3A1, COL5A2, INHBA, THBS2, VCAN, BGN, BIRC5, and DYRK2, and optionally PDE4 isoforms comprising PDE4D5 and/or PDE4D7, and wherein a good prognosis predicts an increased likelihood of survival within a predetermined period after initial diagnosis and/or no progression of disease after primary treatment, and poor prognosis predicts an aggressive disease, a decreased likelihood of survival, an increased likelihood of biochemical recurrence, clinical recurrence, and/or the presence of local or distant metastases, within a predetermined period after initial diagnosis; and/or

[0037] classifying a subject as having or not having a predisposition of prostate cancer that is susceptible to disease progression based on a subject expression profile for the subject, wherein the subject expression profile includes the gene expression level of the signature genes: AZGP1, FBLN1, ILK, KRT15, MEIS2, MYBPC1, PAGE4, SRD5A2, COL1A1, COL3A1, COL5A2, INHBA, THBS2, VCAN, BGN, BIRC5, and DYRK2, and optionally PDE4 isoforms comprising PDE4D5 and/or PDE4D7, wherein the predisposition predicts an aggressive disease, a decreased likelihood of survival, an increased likelihood of biochemical recurrence, clinical recurrence, and/or the presence of local or distant metastases, within a predetermined period after initial diagnosis.

[0038] In one embodiment, a method comprises:

[0039] classifying a subject as prostate cancer-positive or prostate cancer-negative based on a subject expression profile for the subject, wherein the subject expression profile includes the gene expression level of the signature genes: AZGP1, FBLN1, ILK, KRT15, MEIS2, MYBPC1, PAGE4, SRD5A2, COL1A1, COL3A1, COL5A2, INHBA, THBS2, VCAN, BGN, BIRC5, and DYRK2, and optionally PDE4 isoforms comprising PDE4D5 and/or PDE4D7; or

[0040] classifying a subject as having a good prognosis or a poor prognosis based on a subject expression profile for the subject, wherein the subject expression profile includes the gene expression level of the signature genes: AZGP1, FBLN1, ILK, KRT15, MEIS2, MYBPC1, PAGE4, SRD5A2, COL1A1, COL3A1, COL5A2, INHBA, THBS2, VCAN, BGN, BIRC5, and DYRK2, and optionally PDE4 isoforms comprising PDE4D5 and/or PDE4D7, and wherein a good prognosis predicts an increased likelihood of survival within a predetermined period after initial diagnosis and/or no progression of disease after primary treatment, and poor prognosis predicts an aggressive disease, a decreased likelihood of survival, an increased likelihood of biochemical recurrence, clinical recurrence, and/or the presence of local or distant metastases, within a predetermined period after initial diagnosis; or

[0041] classifying a subject as having or not having a predisposition of prostate cancer that is susceptible to disease progression based on a subject expression profile for the subject, wherein the subject expression profile includes the gene expression level of the signature genes: AZGP1, FBLN1, ILK, KRT15, MEIS2, MYBPC1, PAGE4, SRD5A2, COL1A1, COL3A1, COL5A2, INHBA, THBS2, VCAN, BGN, BIRC5, and DYRK2, and optionally PDE4 isoforms comprising PDE4D5 and/or PDE4D7, wherein the predisposition predicts an aggressive disease, a decreased likelihood of survival, an increased likelihood of biochemical recurrence, clinical recurrence, and/or the presence of local or distant metastases, within a predetermined period after initial diagnosis.

[0042] In one embodiment, a method comprises:

[0043] classifying a subject as prostate cancer-positive or prostate cancer-negative based on a subject expression profile for the subject, wherein the subject expression profile includes the gene expression level of the signature genes: AZGP1, FBLN1, ILK, KRT15, MEIS2, MYBPC1, PAGE4, SRD5A2, COL1A1, COL3A1, COL5A2, INHBA, THBS2, VCAN, BGN, BIRC5, and DYRK2, and optionally PDE4 isoforms comprising PDE4D5 and/or PDE4D7; or

[0044] classifying a subject as having a good prognosis or a poor prognosis based on a subject expression profile of the subject, wherein the subject expression profile includes the gene expression level of the signature genes: AZGP1, FBLN1, ILK, KRT15, MEIS2, MYBPC1, PAGE4, SRD5A2, COL1A1, COL3A1, COL5A2, INHBA, THBS2, VCAN, BGN, BIRC5, and DYRK2, and optionally PDE4 isoforms comprising PDE4D5 and/or PDE4D7, and wherein a good prognosis predicts an increased likelihood of survival within a predetermined period after initial diagnosis and/or no progression of disease after primary treatment, and poor prognosis predicts an aggressive disease, a decreased likelihood of survival, an increased likelihood of biochemical recurrence, clinical recurrence, and/or the presence of local or distant metastases, within a predetermined period after initial diagnosis; and

[0045] classifying a subject as having or not having a predisposition of prostate cancer that is susceptible to disease progression based on a subject expression profile for the subject, wherein the subject expression profile includes the gene expression level of the signature genes: AZGP1, FBLN1, ILK, KRT15, MEIS2, MYBPC1, PAGE4, SRD5A2, COL1A1, COL3A1, COL5A2, INHBA, THBS2, VCAN, BGN, BIRC5, and DYRK2, and optionally PDE4 isoforms comprising PDE4D5 and/or PDE4D7, wherein the predisposition predicts an aggressive disease, a decreased likelihood of survival, an increased likelihood of biochemical recurrence, clinical recurrence, and/or the presence of local or distant metastases, within a predetermined period after initial diagnosis.

[0046] In one embodiment, a method comprises:

[0047] classifying a subject as prostate cancer-positive or prostate cancer-negative based on a subject expression profile for the subject, wherein the subject expression profile includes the gene expression level of the signature genes: AZGP1, FBLN1, ILK, KRT15, MEIS2, MYBPC1, PAGE4, SRD5A2, COL1A1, COL3A1, COL5A2, INHBA, THBS2, VCAN, BGN, BIRC5, and DYRK2, and optionally PDE4 isoforms comprising PDE4D5 and/or PDE4D7; and

[0048] classifying a subject as having a good prognosis or a poor prognosis based on a subject expression profile for the subject, wherein the subject expression profile includes the gene expression level of the signature genes: AZGP1, FBLN1, ILK, KRT15, MEIS2, MYBPC1, PAGE4, SRD5A2, COL1A1, COL3A1, COL5A2, INHBA, THBS2, VCAN, BGN, BIRC5, and DYRK2, and optionally PDE4 isoforms comprising PDE4D5 and/or PDE4D7, and wherein a good prognosis predicts an increased likelihood of survival within a predetermined period after initial diagnosis and/or no progression of disease after primary treatment, and poor prognosis predicts an aggressive disease, a decreased likelihood of survival, an increased likelihood of biochemical recurrence, clinical recurrence, and/or the presence of local or distant metastases, within a predetermined period after initial diagnosis; or

[0049] classifying a subject as having or not having a predisposition of prostate cancer that is susceptible to disease progression based on a subject expression profile for the subject, wherein the subject expression profile includes the gene expression level of the signature genes: AZGP1, FBLN1, ILK, KRT15, MEIS2, MYBPC1, PAGE4, SRD5A2, COL1A1, COL3A1, COL5A2, INHBA, THBS2, VCAN, BGN, BIRC5, and DYRK2, and optionally PDE4 isoforms comprising PDE4D5 and/or PDE4D7, wherein the predisposition predicts an aggressive disease, a decreased likelihood of survival, an increased likelihood of biochemical recurrence, clinical recurrence, and/or the presence of local or distant metastases, within a predetermined period after initial diagnosis.

[0050] In one embodiment, a method comprises:

[0051] classifying a subject as prostate cancer-positive or prostate cancer-negative based on a subject expression profile for the subject, wherein the subject expression profile includes the gene expression level of the signature genes: AZGP1, FBLN1, ILK, KRT15, MEIS2, MYBPC1, PAGE4, SRD5A2, COL1A1, COL3A1, COL5A2, INHBA, THBS2, VCAN, BGN, BIRC5, and DYRK2, and optionally PDE4 isoforms comprising PDE4D5 and/or PDE4D7; and

[0052] classifying a subject as having a good prognosis or a poor prognosis based on a subject expression profile for the subject, wherein the subject expression profile includes the gene expression level of the signature genes: AZGP1, FBLN1, ILK, KRT15, MEIS2, MYBPC1, PAGE4, SRD5A2, COL1A1, COL3A1, COL5A2, INHBA, THBS2, VCAN, BGN, BIRC5, and DYRK2, and optionally PDE4 isoforms comprising PDE4D5 and/or PDE4D7, and wherein a good prognosis predicts an increased likelihood of survival within a predetermined period after initial diagnosis and/or no progression of disease after primary treatment, and poor prognosis predicts an aggressive disease, a decreased likelihood of survival, an increased likelihood of biochemical recurrence, clinical recurrence, and/or the presence of local or distant metastases, within a predetermined period after initial diagnosis; and

[0053] classifying a subject as having or not having a predisposition of prostate cancer that is susceptible to disease progression based on a subject expression profile for the subject, wherein the subject expression profile includes the gene expression level of the signature genes: AZGP1, FBLN1, ILK, KRT15, MEIS2, MYBPC1, PAGE4, SRD5A2, COL1A1, COL3A1, COL5A2, INHBA, THBS2, VCAN, BGN, BIRC5, and DYRK2, and optionally PDE4 isoforms comprising PDE4D5 and/or PDE4D7, wherein the predisposition predicts an aggressive disease, a decreased likelihood of survival, an increased likelihood of biochemical recurrence, clinical recurrence, and/or the presence of local or distant metastases, within a predetermined period after initial diagnosis.

[0054] In some embodiments of various aspects of the invention, the subject is a patient diagnosed with prostate cancer.

[0055] In some embodiments of various aspects of the invention, the subject expression profile is obtained from a sample from a subject.

[0056] In a particular embodiment of various aspects of the invention, the sample is cell lines.

[0057] In some embodiments of various aspects of the invention, the patient is selected from the group comprising (a) those with newly diagnosed prostate cancer, (b) those that have been subjected to primary treatment for prostate cancer.

[0058] In an embodiment of various aspects of the invention, the patient was previously diagnosed with clinically localized prostate cancer.

[0059] In an embodiment of various aspects of the invention, the primary treatment is selected from the group consisting of prostate surgery, prostate removal, radiotherapy, chemotherapy, limited or extended lymph node removal.

[0060] In an embodiment of various aspects of the invention, the patient in group (a) are further selected from patients with newly diagnosed prostate cancer that have been subjected to at least one of the following methods: determination of the blood levels of prostate-specific antigen (PSA), digital rectal exam (DRE) and transrectal ultrasound analysis (TRUS), and biopsy of the prostate.

[0061] In some embodiments of various aspects of the invention, the predetermined period is at least 6 months, at least 1 year, at least 2 years, at least 3 years, at least 4 years, at least 5 years, at least 10 years, or at least 15 years.

[0062] In some embodiments of various aspects of the invention, the gene expression level is determined by detecting mRNA expression using one or more probes and/or one or more probe sets.

[0063] In some embodiments of various aspects of the invention, the gene expression level is determined by an amplification based method and/or microarray analysis.

[0064] In some embodiments of various aspects of the invention, the gene expression level is determined by RNA sequencing, PCR, qPCR or multiplex-PCR.

[0065] In some embodiments of various aspects of the invention, the patient expression profile is converted to a prostate cancer progression index (PCPI).

[0066] In an embodiment, the prostate cancer progression index is calculated according to the following equation:

PCPI=(GEV_av_GOI_up)−(GEV_av_GOI_down),

wherein GEV_av_GOI_up is an average gene expression value of up-regulated genes, and wherein GEV_av_GOI_down is an average gene expression value of down-regulated genes, wherein the values are determined on the basis of normalized gene expression data per each subject sample. The PCPI calculation can render a good prediction of prognosis or a good performance in other clinical applications as described herein.

[0067] In some embodiments of various aspects of the invention, the expression level of the set of the signature genes is normalized to the expression of a reference gene, preferably wherein the reference gene is a housekeeping gene, and more preferably wherein the housekeeping gene is TBP, HPRT1, ACTB, RPLP0, PUM1, POLR2A or B2M.

[0068] In a particular embodiment of the invention, the subject is classified as prostate cancer-positive when expression of any one or more genes selected from the group consisting of COL1A1, COL3A1, COL5A2, INHBA, THBS2, VCAN, BGN, BIRC5, DYRK2 is up-regulated as compared with the corresponding gene expression levels in a control sample, and wherein the expression of any one or more genes selected from the group consisting of AZGP1, FBLN1, ILK, KRT15, MEIS2, MYBPC1, PAGE4, SRD5A2 and optionally of PDE4D5 and/or PDE4D7 is down-regulated as compared with the corresponding gene expression levels in a control sample; or the subject is classified as prostate cancer-negative when expression of any one or more genes selected from the group consisting of COL1A1, COL3A1, COL5A2, INHBA, THBS2, VCAN, BGN, BIRC5, DYRK2 is down-regulated as compared with the corresponding gene expression levels in a control sample, and wherein the expression of any one or more genes selected from the group consisting of AZGP1, FBLN1, ILK, KRT15, MEIS2, MYBPC1, PAGE4, SRD5A2 and optionally of PDE4D5 and/or PDE4D7 is up-regulated as compared with the corresponding gene expression levels in a control sample. The selected genes can render a good performance in the classification.

[0069] In some embodiments of various aspects of the invention, the subject is classified as having a good prognosis if the prostate cancer progression index is below a selected threshold or as having a poor prognosis if the prostate cancer progression index is above the selected threshold; and/or the subject is classified as having a predisposition of prostate cancer that is susceptible to disease progression if the prostate cancer progression index is above a selected threshold or as not having a predisposition of prostate cancer that is susceptible to disease progression if the prostate cancer progression index is below the selected threshold.

[0070] In some embodiments of various aspects of the invention, the method further comprises stratifying the subject for the risk of aggressive disease versus non-aggressive disease according to the prognosis determined or the predisposition determined; and/or providing a suitable cancer treatment to the subject in need thereof according to the prognosis determined or the predisposition determined.

[0071] In some embodiments of various aspects of the invention, the cancer treatment is selected from prostate surgery, prostate removal, radiotherapy, chemotherapy, hormone therapy, limited or extended lymph node removal or combinations thereof, preferably the combination of hormone therapy and radiation therapy.

[0072] In some embodiments of various aspects of the invention, the poor prognosis or the predisposition of prostate cancer that is susceptible to disease progression is indicative of eligibility of the subject to be treated with any one or more of the treatments selected from the group consisting of prostate surgery, prostate removal, chemotherapy, radiotherapy, limited or extended lymph node dissection.

[0073] In some embodiments of various aspects of the invention, a predisposition for aggressive prostate cancer is indicative of eligibility for a treatment selected from the group comprising re-biopsy, prostate surgery, prostate removal, chemotherapy, radiotherapy, hormone therapy limited or extended lymph node dissection or combinations thereof, preferably the combination of hormone therapy and radiation therapy.

[0074] In some embodiments of various aspects of the invention, the method further comprises displaying or outputting a result of one of the steps to a user interface device, a computer readable storage medium, a monitor, or a computer that is part of a network.

[0075] A further aspect relates to a product comprising:

[0076] primers and/or probes for determining the gene expression level for the signature genes: AZGP1, FBLN1, ILK, KRT15, MEIS2, MYBPC1, PAGE4, SRD5A2, COL1A1, COL3A1, COL5A2, INHBA, THBS2, VCAN, BGN, BIRC5, and DYRK2, and optionally PDE4 isoforms comprising PDE4D5 and/or PDE4D7;

[0077] optionally further comprising primers and/or probes for determining the expression levels of a set of genes listed in either FIG. 1 or 2 other than the above-mentioned genes; and/or

[0078] optionally further comprising primers and/or probes for determining the gene expression level of a reference gene, preferably wherein the reference gene is a housekeeping gene, and more preferably wherein the housekeeping gene is TBP, HPRT1, ACTB, RPLP0, PUM1, POLR2A or B2M.

[0079] In some embodiments, the product is a kit including for example a PCR kit, a RNA-sequencing kit, or a microarray kit preferably a DNA microarray kit. In another embodiment, the product is a microarray. The product can provide an efficient way for determining the levels as described herein and thus can render a good performance in clinical applications as described herein.

[0080] In some embodiments, the product is a product for performing the method of the invention, or the product is a product for diagnosis of prostate cancer, for establishing a prognosis for a patient diagnosed with prostate, for stratification of a patient diagnosed with prostate cancer, for the determination of predisposition for aggressive or indolent prostate cancer in a patient having a prostate cancer.

[0081] In some embodiments, the product is a composition comprising a set of nucleic acid molecules each comprising at least one polynucleotide probe sequence in the analysis of the gene expression of the genes comprised by any one of FIG. 1 or 2, or the genes as described above.

[0082] In some embodiments, the product is an nucleic acid array comprising for each gene in a set of genes, the set of genes comprising the genes listed in FIG. 1 or 2, or the genes as described above, one or more polynucleotide probes complementary and hybridizable to a coding sequence in the gene, for determining a prostate expression profile and/or a PCPI as defined above.

[0083] In some embodiments, the product is a kit for diagnosis of prostate cancer, for establishing a prognosis for a patient diagnosed with prostate, for stratification of a patient diagnosed with prostate cancer, for the determination of predisposition for aggressive or indolent prostate cancer in a patient having a prostate cancer according any one of methods as described herein comprising: a) an array as defined herein, b) a kit control; and c) optionally instructions for use.

[0084] In some embodiments, the product is a nucleic acid array for the expression analysis of nucleic acids obtained from a biological sample, wherein said array comprises a substrate comprising probes suitable for the specific binding of nucleic acids or fragments thereof encoded by the genes referred to in FIG. 1 or 2, or the genes as described above.

[0085] In some embodiments, the product is an article for PCR comprising reagents for specifically amplifying and detecting nucleic acids or fragments thereof encoded by the genes referred to of FIG. 1 or 2, or the genes as described above.

[0086] A further aspect of the invention relates to a therapy selected from prostate surgery, prostate removal, radiotherapy, hormone therapy, chemotherapy, limited or extended lymph node removal or combinations thereof for use in the treatment of patients identified as eligible, wherein said patients are diagnosed with a predisposition for aggressive prostate cancer as defined the methods of the invention.

[0087] A further aspect of the invention relates to a computer program product, comprising computer readable code stored on a computer readable medium or downloadable from a communications network, which, when run on a computer, implement one or more steps or all the steps of any one of the methods as described herein.

[0088] A further aspect of the invention relates to a non-transitory computer readable storage medium with an executable program stored thereon, wherein the program instructs a microprocessor to perform one or more of the steps of any of the methods of the invention.

[0089] A yet further aspect of the invention relates to a device for gene expression analysis of nucleic acids (or fragments thereof) encoded by genes referred to in FIG. 1 or 2, or the genes described above, wherein the device preferably comprises:

[0090] a) a database including records comprising reference gene expression values associated with clinical outcomes, each reference profile comprising the expression levels of a set of genes listed in either FIG. 1 or 2, or the genes as described above, and/or

[0091] b) a user interface capable of receiving and/or inputting a selection of gene expression values of a set of genes, the set comprising genes listed in FIG. 1 or 2, or the genes as described above, for use in comparing to the gene reference expression profiles in the database;

[0092] c) an output that displays a prediction of clinical prognosis according to the expression levels of the set of genes.

[0093] A yet further aspect of the invention relates to a device for performing the method of the invention.

[0094] A still further aspect of the invention relates to a system comprising the product of invention and the computer program product or the non-transitory computer readable storage medium of the invention or the device for gene expression analysis of nucleic acids of the invention or a device for performing the method of the invention.

### BRIEF DESCRIPTION OF THE DRAWINGS

[0095] FIG. 1 shows a table comprising gene candidates analyzed which are derived from publically available study data.

[0096] FIG. 2 shows a table comprising 57 gene candidates analyzed to build the PCPI.

[0097] FIG. 3 shows an overview on the performance of PCPI_18 or PCPI_17 to predict the primary endpoint of development of distant metastases within 10-15 years after primary treatment (prostate surgery) for the data sets GSE21032, GSE41408, GSE25136, GSE16560, GSE10645.

[0098] FIG. 4 shows the performance of PCPI_18 to predict the primary endpoint of development of distant metastases within 10-15 years after primary treatment for the data set GSE46691.

[0099] FIG. 5 shows the performance of PCPI_18 or PCPI_17 to predict the primary endpoint of development of distant metastases within 10-15 years after primary treatment (prostate surgery in general) for the data sets GSE21032, GSE41408, GSE16560, GSE10645 in a multivariate COX regression analysis compared to standard clinical parameters like pre-treatment PSA, biopsy or pathology Gleason score, or clinical/pathology disease stage. The Chi Square as well as the Hazard Ratio for the PCPI and the individual clinical parameters is shown for each individual data set.

[0100] FIG. 6 shows an overview on the performance of PCPI_18 to predict the primary endpoint of development of biochemical disease recurrence (BCR) within 10-15 years after primary treatment (prostate surgery in general) for the data sets GSE21032, GSE41408, GSE25136.

[0101] FIG. 7 shows the performance of PCPI_18 to predict the primary endpoint of development of biochemical disease recurrence (BCR) within 10-15 years after primary treatment (prostate surgery in general) for the data sets GSE21032, GSE41408, GSE25136 in a multivariate COX regression analysis compared to standard clinical parameters like pre-treatment PSA, biopsy or pathology Gleason score, or clinical/pathology disease stage.

[0102] FIG. 8 shows a ROC curve cut-off analysis for PCPI_18 to support clinical decision making towards e.g. patient stratification for either active surveillance (AS) or active treatment (e.g., prostatectomy, radiotherapy and hormone therapy).

[0103] FIG. 9 lists genes of interest mentioned in this application with their Transcript ID, Protein ID as well as primer and probe sequences specific for the genes of interest.

[0104] FIG. 10 lists reference genes mentioned in this application with their Transcript ID, Protein ID as well as primer and probe sequences specific for the reference genes.

[0105] FIG. 11 shows an analysis of different recurrence risks over 5 to 10 years for 422 patients grouped according to the PCPI_19 and the NCCN clinical risk characteristics as can be inferred from the guidelines of the National Comprehensive Cancer Network's (NCCN) webpage (https://www.nccn.org/professionals/physician_gls/f_guidelines.asp).

[0106] FIG. 12 shows an analysis of different recurrence risks over 5 to 10 years for 407 patients grouped according to the GPSu score and the NCCN clinical risk characteristics as can be inferred from the guidelines of the National Comprehensive Cancer Network's (NCCN) webpage (https://www.nccn.org/professionals/physician_gls/f_guidelines.asp).

[0107] FIG. 13 shows an analysis of different recurrence risks over 5 to 10 years for 407 patients grouped according to the CCP score and the NCCN clinical risk characteristics as can be inferred from the guidelines of the National Comprehensive Cancer Network's (NCCN) webpage (https://www.nccn.org/professionals/physician gls/f guidelines.asp).

### DETAILED DESCRIPTION OF EMBODIMENTS

[0108] Although the present invention will be described with respect to particular embodiments, this description is not to be construed in a limiting sense.

[0109] Before describing in detail exemplary embodiments of the present invention, definitions important for understanding the present invention are given.

[0110] As used in this specification and in the appended claims, the singular forms of “a” and “an” also include the respective plurals unless the context clearly dictates otherwise.

[0111] In the context of the present invention, the terms “about” and “approximately” denote an interval of accuracy that a person skilled in the art will understand to still ensure the technical effect of the feature in question. The term typically indicates a deviation from the indicated numerical value of ±20%, preferably ±15%, more preferably ±10%, and even more preferably ±5%.

[0112] It is to be understood that the term “comprising” is not limiting. For the purposes of the present invention the term “consisting of” is considered to be a preferred embodiment of the term “comprising of”. If hereinafter a group is defined to comprise at least a certain number of embodiments, this is meant to also encompass a group which preferably consists of these embodiments only.

[0113] Furthermore, the terms “first”, “second”, “third” or “(a)”, “(b)”, “(c)”, “(d)” etc. and the like in the description and in the claims, are used for distinguishing between similar elements and not necessarily for describing a sequential or chronological order. It is to be understood that the terms so used are interchangeable under appropriate circumstances and that the embodiments of the invention described herein are capable of operation in other sequences than described or illustrated herein.

[0114] In case the terms “first”, “second”, “third” or “(a)”, “(b)”, “(c)”, “(d)” etc. relate to steps of a method or use there is no time or time interval coherence between the steps, i.e. the steps may be carried out simultaneously or there may be time intervals of seconds, minutes, hours, days, weeks, months or even years between such steps, unless otherwise indicated in the application as set forth herein above or below. It is to be understood that this invention is not limited to the particular methodology, protocols, proteins, bacteria, vectors, reagents etc. described herein as these may vary. It is also to be understood that the terminology used herein is for the purpose of describing particular embodiments only, and is not intended to limit the scope of the present invention that will be limited only by the appended claims. Unless defined otherwise, all technical and scientific terms used herein have the same meanings as commonly understood by one of ordinary skill in the art.

[0115] The term “signature gene(s)”, marker gene(s), or “gene of interest (GOI)” in the context of the present invention can be used interchangeably and designates biomarkers whose expression level is determined in the methods of the present invention. In preferred embodiments of the present invention, these genes are depicted in FIG. 2 of the present disclosure, and referred to explicitly below as well as in the claims. Therefore, the present invention concerns marker gene(s), the expression of which is either up-regulated or down-regulated when comparing the expression in prostate cancer tissue obtained after primary treatment or after initial prostate cancer diagnosis to the expression in prostate cancer tissue obtained before initial prostate cancer diagnosis and/or before initial prostate cancer-specific treatment. The marker gene expression in tissues obtained after primary treatment or after initial prostate cancer diagnosis may be correlated to patient outcome parameters, e.g. biochemical recurrence, development of metastasis, bone cancer and/or death.

[0116] When the expression values are determined in the context of the methods of the present invention, an individualized “gene expression profile” is obtained that reflects the gene expression values of the GOI's in a sample or in subject. In the latter case, the expression values are also referred to as “subject expression profile”. It is noted that the sample expression profile and/or the subject expression profile may change as a function of time. For example, the gene expression profiles before or after therapeutic treatment of a patient with diagnosed prostate cancer may be different. Similarly, the genes expression profiles found in a sample containing prostate cancer cells will be different from those found in a sample that does not contain prostate cancer cells.

[0117] The term “marker gene(s)” or “gene(s) of interest” as used herein, thus relates to a set of gene(s), genetic unit(s) or sequence(s) (nucleotide sequence(s)) as defined herein above, whose expression level is either up-regulated or down-regulated in a prostate cancer cell or tissue or in any type of sample comprising such cells or tissues or portions or fragments thereof, when comparing to a control level, preferably when comparing to the expression in prostate tissue obtained at a different point in time, e.g. at initial diagnosis, directly after primary treatment, or later, i.e. several months or years after initial diagnosis or primary treatment. The term refers to any expression product of said genetic unit or sequence, in particular to an mRNA transcript. When the marker genes or genes of interest are examined for the first time, i.e. when a patient is for the first time suspected to have a prostate cancer, it is also contemplated to use additional control material that is derived from normal tissue or benign prostate tumor tissue.

[0118] The term “expression level” as used herein refers to the amount of marker gene transcript(s) derivable from a defined number of cells or a defined tissue portion, preferably to the amount of transcript obtainable in a standard nucleic acid (e.g. RNA) extraction procedure. Suitable extraction methods are known to the person skilled in the art.

[0119] The term “control level” (or “control state”), as used herein, relates to an expression level which may be determined at the same time and/or under similar or comparable conditions as the test sample by using (a) sample(s) previously collected and stored from a patient/patients whose condition or disease state, e.g. non-cancerous, normal or benign prostate tumor, advanced prostate cancer etc. is/are known. For the determination of a predisposition for aggressive cancer versus indolent cancer, the control level is preferably determined in cancer tissue obtained to establish the initial diagnosis, which is then compared to the expression of GOI's that is determined at a later stage, e.g. after primary treatment. The term “disease state” or “cancerous disease state” relates to any state or type of cellular or molecular condition between a non-cancerous cell state and (including) a terminal cancerous cell state. Preferably, the term includes different cancerous proliferation/developmental stages or levels of tumor development in the organism between (and excluding) a non-cancerous cell state and (including) a terminal cancerous cell state. Such developmental stages may include all stages of the TNM (Tumor, Node, Metastasis) classification system of malignant tumors as defined by the UICC, e.g. stages 0 and I to IV. The term also includes stages before TNM stage 0, e.g. developmental stages in which cancer biomarkers known to the person skilled in the art show a modified expression or expression pattern.

[0120] The expression level as mentioned above may preferably be the expression level of marker gene(s) or GOI's as defined herein.

[0121] The term “cancerous” relates in the context of the present invention to a cancerous disease state as defined herein above.

[0122] The term “non-cancerous” relates in the context of the present invention to a condition in which neither benign nor malign proliferation can be detected. Suitable means for said detection are known in the art.

[0123] The expression control level may be determined by a statistical method based on the results obtained by analyzing previously determined expression level(s) of the marker gene(s) of the present invention in samples from subjects whose disease state is known. Furthermore, the control level can be derived from a database of expression patterns or expression levels from previously tested patients, tissues or cells. The control level can be determined from a reference sample derived from a patient who has been diagnosed to suffer from prostate cancer, e.g. from hormone-independent or hormone-resistant prostate cancer. Moreover, the expression level of the marker genes of the present invention in a biological sample to be tested may be compared to multiple control levels, whose control levels are determined from multiple reference samples. It is contemplated to use a control level determined from a reference sample derived from a tissue type similar to that of the subject-derived biological sample. It is particularly preferred to use sample(s) derived from a patient whose disease state is cancerous as defined herein above.

[0124] In general diagnostic methods of prostate cancer using the herein described marker genes, it also possible to determine the control level in tissues of subjects that present a health condition in which neither benign nor malign proliferation can be detected. It is also contemplated to use sample(s) derived from a patient/patients having benign prostate tumor as defined herein above, i.e. which present a health condition in which benign proliferation can be detected.

[0125] The term “benign prostate tumor” as used herein refers to a prostate tumor which lacks all three of the malignant properties of a cancer, i.e. does not grow in an unlimited, aggressive manner, does not invade surrounding tissues, and does not metastasize. Typically, a benign prostate tumor implies a mild and non-progressive prostate neoplastic or swelling disease lacking the invasive properties of a cancer. Furthermore, benign prostate tumors are typically encapsulated, and thus inhibited in their ability to behave in a malignant manner. A benign tumor or a healthy condition may be determined by any suitable, independent molecular, histological or physiological method known to the person skilled in the art.

[0126] Alternatively, reference samples may comprise material derived from cell lines, e.g. immortalized cancer cell lines. Preferably, material derived from prostate cancer cell lines, may be comprised in a reference sample according to the present invention. Examples of preferred cancer cell lines comprise cells lines PC346P, PC346B, LNCaP, VCaP, DuCaP, PC346C, PC3, DU145, PC346CDD, PC346Flu1, PC346F1u2.

[0127] In a further, preferred alternative, reference samples may be derived from subject/patient tissues, or tissue panels or tissue collections obtained in clinical environments. The samples may, for example, be obtained from male patients undergoing surgery. The samples may be derived from any suitable tissue type, e.g. from prostate tissue or lymph nodes. Preferred examples of patient tissue collections are derived from surgical procedures (e.g., prostatectomy).

[0128] Moreover, it is contemplated to use the standard value of the expression levels of the marker gene(s) of the present invention in a population with a known disease state, e.g. a population having benign prostate tumor or a healthy population. The standard value may be obtained by any method known in the art. For example, a range of mean ±2 SD (standard deviation) or mean ±3 SD may be used as standard value.

[0129] Furthermore, the control level may also be determined at the same time and/or under similar or comparable conditions as the test sample by using (a) sample(s) previously collected and stored from a patient/patients whose disease state is/are known to be cancerous, i.e. who have independently been diagnosed to suffer from prostate cancer, in particular from aggressive prostate cancer.

[0130] In the context of the present invention, a control level determined from a biological sample that is known not to be cancerous, e.g. is a healthy tissue sample or a benign prostate tumor sample, is called “normal control level”.

[0131] If the control level is determined from a cancerous biological sample, in particular a sample from a patient for which prostate cancer was diagnosed independently, it may be designated as “cancerous control level”.

[0132] The term “prostate cancer” relates to a cancer of the prostate gland in the male reproductive system, which occurs when cells of the prostate mutate and begin to multiply out of control. Typically, prostate cancer is linked to an elevated level of prostate-specific antigen (PSA). In one embodiment of the present invention the term “prostate cancer” relates to a cancer showing PSA levels above 4.0. In another embodiment the term relates to cancer showing PSA levels above 2.0. The term “PSA level” refers to the concentration of PSA in the blood in ng/ml.

[0133] The term “prostate cancer” also comprises prostate cancer or prostate cancer cell lines that are sensitive on male sex hormone stimulation as far as their growth or proliferation is concerned. The term “sensitive” relates to situations in which the prostate cancer or prostate cancer cell line shows a biochemical or cellular reaction pattern in the presence of male sex hormones, but does need a male sex hormone for growth and/or proliferation. A hormone-sensitive prostate is accordingly understood as a malignant prostate tumor that has developed from pre-malignant forms like PIN (Prostate Intraepithelial Neoplasia) and is characterized by the fact that its growth is still dependent on the presence of the male sex hormones androgens. In contrast, once such tumors are treated by hormone depletion therapies those cancers typically develop into a hormone-resistant form that grows independent of the presence of androgens.

[0134] The term “hormone-resistant prostate cancer” means that the growth and proliferation of prostate cancer or prostate cancer cell lines is resistant to male sex hormone stimulation. The term also relates to a late prostate cancer developmental stage which is no longer amenable to an administration of anti-hormones, preferably anti-androgens as defined herein above.

[0135] The term “male sex hormone” as used herein refers to an androgen, preferably to testosterone, androstenedione, dihydrotestosterone, dehydroepiandrosterone, androstenediol or androsterone.

[0136] In a further aspect the present invention relates to the use of marker gene(s) or GOI's as a marker for diagnosing, detecting, monitoring or prognosticating malignant, hormone-sensitive prostate cancer or the progression towards prostate cancer.

[0137] The term “up-regulated” or “up-regulated expression level” or “increase of expression level” (which may be used synonymously) in the context of the present invention thus denotes a raise in the expression level between a situation to be analyzed, e.g. a situation derivable from a patient's sample, and a reference point, which could either be a normal control level or cancerous control level derivable from any suitable prostate tumor or cancer stage known to the person skilled in the art. Expression levels are deemed to be “up-regulated” when the gene expression, e.g. in a sample to be analyzed, differs by, i.e. is elevated by, for example, 5%, 6%, 7%, 8%, 9%, 10%, 15%, 20%, 25%, 30%, 40%, 50%, or more than 50% in comparison to a control level, or by at least 0.1 fold, at least 0.2 fold, at least 1 fold, at least 2 fold, at least 5 fold, or at least 10 fold or more in comparison to a control level. The control level may either be a normal control level or a cancerous control level as defined herein above. If a comparison with a cancerous control level is to be carried out, an additional comparison with a normal control level is preferred. Such an additional comparison allows for the determination of a tendency of the modification, e.g. the magnitude of an increase of the expression level may be observed and/or corresponding conclusions may be drawn. Preferred is a comparison to a benign prostate tumor, or to a healthy tissue or a sample derived from a healthy individual.

[0138] The term “down-regulated” or “down-regulated expression level” or “decrease of expression level” (which may be used synonymously) in the context of the present invention thus denotes a drop in the expression level between a situation to be analyzed, e.g. a situation derivable from a patient's sample, and a reference point, which could either be a normal control level or preferably cancerous control level derivable from any suitable prostate tumor or cancer stage known to the person skilled in the art. Expression levels are deemed to be “down-regulated” when the gene expression, e.g. in a sample to be analyzed, differs by, i.e. is decreased by, for example, 5%, 6%, 7%, 8%, 9%, 10%, 15%, 20%, 25%, 30%, 40%, 50%, or more than 50% in comparison to a control level, or by at least 0.1 fold, at least 0.2 fold, at least 1 fold, at least 2 fold, at least 5 fold, or at least 10 fold or more in comparison to a control level. The control level may either be a normal control level or a cancerous control level as defined herein above. If a comparison with a cancerous control level is to be carried out, an additional comparison with a normal control level is possible. Such an additional comparison allows for the determination of a tendency of the modification, e.g. the magnitude of decrease of the expression level may be observed and/or corresponding conclusions may be drawn. Preferred is a comparison to a benign prostate tumor, or to a healthy tissue or a sample derived from a healthy individual.

[0139] The expression values of the gene(s) of interest referred to herein can be used to establish a “Prostate Cancer Progression Index (PCPI)” using the following equation:

PCPI=(GEV_av_GOI_up)−(GEV_av_GOI_down),

[0140] wherein GOI refers to selected Genes of Interest, e.g. (bio-)marker genes, which are grouped into those down-regulated between patient groups with and without progression after primary treatment compared to those up-regulated between patient groups with and without progression after primary treatment. An average gene expression value for the down-regulated genes is calculated (GEV_av_GOI_down) as well as an average gene expression value for the up-regulated genes (GEV_av_GOI_up).

[0141] A specific embodiment a subject sample specific prostate cancer progression index is calculated according to the following equation:

PCPI=(GEV_av_GOI_up)−(GEV_av_GOI_down),

wherein GEV_av_GOI_up is an average gene expression value of up-regulated genes, and wherein GEV_av_GOI_down is an average gene expression value of a down-regulated genes, wherein the values are determined on the basis of normalized gene expression data per each patient sample and wherein “up-regulated genes” refer to genes up-regulated between patient groups with and without progression after primary treatment and “down-regulated genes” refer to genes down-regulated between patient groups with and without progression after primary treatment.

[0142] A selection of genes potentially relevant to patient stratification in prostate cancer or to determine the predisposition to develop aggressive prostate cancer after primary treatment is provided e.g. in FIG. 2. FIG. 2 provides an overview of 57 selected genes that were found to be significantly (p<0.05) differentially expressed and were regulated between patient groups in the same direction (i.e., either up- or down-regulated). These 57 genes may be used as GOI's according to one aspect of the invention. It is also possible to use selected genes from the above 57 genes, e.g. at least 17 genes, at least 18 genes, at least 19 genes, at least 20 genes, at least 21 genes, at least 22 genes, at least 23 genes, at least 24 genes, at least 25 genes, at least 26 genes, at least 27 genes, at least 28 genes, at least 29 genes, at least 30 genes, at least 31 genes, at least 32 genes, at least 33 genes, at least 34 genes, at least 35 genes, at least 36 genes, at least 37 genes, at least 38 genes, at least 39 genes, at least 40 genes, at least 41 genes, at least 42 genes, at least 43 genes, at least 44 genes, at least 45 genes, at least 46 genes, at least 47 genes, at least 48 genes, at least 49 genes, at least 50 genes, or more.

[0143] In another aspect a gene expression prognostic signature comprised of a combination of individual genes is provided, wherein the expression level of these GOI's can be measured using, e.g. RNA extracted from human prostate cancer tissue samples in a quantitative manner. The combination of these features into a single data model (i.e. the PCPI) provides significantly improved classification power to predict the progression of prostate cancer.

[0144] In one preferred embodiment the PCPI signature comprises the following 19 genes: PDE4D5, PDE4D7, AZGP1, FBLN1, ILK, KRT15, MEIS2, MYBPC1, PAGE4, SRD5A2, COL1A1, COL3A1, COL5A2, INHBA, THBS2, VCAN, BGN, BIRC5, and DYRK2.

[0145] The term “phosphodiesterase 4D5” or “PDE4D5” relates to the splice variant 5 of the human phosphodiesterase PDE4D, i.e. the human phosphodiesterase PDE4D5 gene, preferably to the sequence as defined in NCBI Reference Sequence: NM_001197218.1, more preferably to the nucleotide sequence as set forth in SEQ ID NO: 1, which corresponds to the sequence of the above indicated NCBI Reference Sequence of the PDE4D5 transcript, and also relates to the corresponding amino acid sequence as set forth in SEQ ID NO: 2, which corresponds to the protein sequence defined in NCBI Protein Accession Reference Sequence NP_001184147.1 encoding the PDE4D5 polypeptide. The term “phosphodiesterase 4D5” or “PDE4D5” also relates to the amplicon that can be generated by the primer pair PDE1D5_forward (SEQ ID NO: 3) and the PDE1D5_reverse (SEQ ID NO: 4) and can be detected by probe SEQ ID NO: 5.

[0146] The term “phosphodiesterase 4D7” or “PDE4D7” relates to the splice variant 7 of the human phosphodiesterase PDE4D, i.e. the human phosphodiesterase PDE4D7 gene, preferably to the sequence as defined in NCBI Reference Sequence: NM_001165899.1, more preferably to the nucleotide sequence as set forth in SEQ ID NO: 6, which corresponds to the sequence of the above indicated NCBI Reference Sequence of the PDE4D7 transcript, and also relates to the corresponding amino acid sequence as set forth in SEQ ID NO: 7, which corresponds to the protein sequence defined in NCBI Protein Accession Reference Sequence NP_001159371.1 encoding the PDE4D7 polypeptide. The term “phosphodiesterase 4D7” or “PDE4D7” also relates to the amplicon that can be generated by the primer pair PDE1D7_forward (SEQ ID NO: 8) and the PDE1D7_reverse (SEQ ID NO: 9) and can be detected by probe SEQ ID NO: 10.

[0147] The term “AZGP1” relates to the Alpha-2-Glycoprotein 1-Zinc-Binding gene, preferably to the sequence as defined in NCBI Reference Sequence: NM_001185.3, more preferably to the nucleotide sequence as set forth in SEQ ID NO: 11, which corresponds to the sequence of the above indicated NCBI Reference Sequence of the AZGP1 transcript, and also relates to the corresponding amino acid sequence as set forth in SEQ ID NO: 12, which corresponds to the protein sequence defined in NCBI Protein Accession Reference Sequence NP_001176.1 encoding the AZGP1 polypeptide. The term “AZGP1” also relates to the amplicon that can be generated by the primer pair AZGP1_forward (SEQ ID NO: 13) and the AZGP1_reverse (SEQ ID NO: 14) and can be detected by probe SEQ ID NO: 15.

[0148] The term “FBLN1” relates to the Fibulin1 gene, preferably to one or more of the sequences as defined in NCBI Reference Sequence: NM_001996.3, NM_006485.3, NM_006486.2 and NM_006487.2, more preferably to the nucleotide sequences as set forth in SEQ ID NO: 16, 17, 18 and 19, respectively, which correspond to the sequences of the above indicated NCBI Reference Sequences of the Fibulin1 transcripts, and also relate to the corresponding amino acid sequence as set forth in SEQ ID NO: 20, 21, 22 and 23 which correspond to the protein sequences defined in NCBI Protein Accession Reference Sequences NP_001987.2, NP_006476.2, NP_006477.2 and NP_006478.2, respectively, encoding Fibulin1 polypeptides. The term “FBLN1” also relates to the amplicon(s) that can be generated by the primer pair FBLN1_forward (SEQ ID NO: 24) and the FBLN1_reverse (SEQ ID NO: 25) and can be detected by probe SEQ ID NO: 26.

[0149] The term “ILK” relates to the Integrin-Linked Kinase gene, preferably to one or more of the sequences as defined in NCBI Reference Sequences: NM_001014794.2, NM_001014795.2, NM_001278441.1, NM_001278442.1 and NM_004517.3, more preferably to the nucleotide sequences as set forth in SEQ ID NO: 27, 28, 29, 30 and 31, respectively, which correspond to the sequences of the above indicated NCBI Reference Sequences of the Integrin-Linked Kinase transcripts, and also relate to the corresponding amino acid sequence as set forth in SEQ ID NO: 32, 33, 34, 35 and 36 which correspond to the protein sequences defined in NCBI Protein Accession Reference Sequences NP_001014794.1, NP_001014795.1, NP_001265370.1, NP_001265371.1 and NP_004508.1 respectively, encoding Integrin-Linked Kinase polypeptides. The term “ILK” also relates to the amplicon(s) that can be generated by the primer pair ILK_forward (SEQ ID NO: 37) and the ILK_reverse (SEQ ID NO: 38) and can be detected by probe SEQ ID NO: 39.

[0150] The term “KRT15” relates to the Keratin 15 gene, preferably to the sequence as defined in NCBI Reference Sequence: NM_002275.3, more preferably to the nucleotide sequence as set forth in SEQ ID NO: 40, which corresponds to the sequence of the above indicated NCBI Reference Sequence of the KRT15 transcript, and also relates to the corresponding amino acid sequence as set forth in SEQ ID NO: 41, which corresponds to the protein sequence defined in NCBI Protein Accession Reference Sequence NP_002266.2 encoding the KRT15 polypeptide. The term “KRT15” also relates to the amplicon that can be generated by the primer pair KRT15_forward (SEQ ID NO: 42) and the KRT15_reverse (SEQ ID NO: 43) and can be detected by probe SEQ ID NO: 44.

[0151] The term “MEIS2” relates to the Meis Homeobox 2 preferably to one or more of the sequences as defined in NCBI Reference Sequences: NM_001220482.1, NM_002399.3, NM_170674.4, NM_170675.4, NM_170676.4, NM_170677.4, NM_172315.2 and NM_020149.2 more preferably to the nucleotide sequences as set forth in SEQ ID NO: 45, 46, 47, 48, 49, 50, and/or 51, respectively, which correspond to the sequences of the above indicated NCBI Reference Sequences of the MEIS2 transcripts, and also relate to the corresponding amino acid sequence as set forth in SEQ ID NO: 53, 54, 55, 56, 57, 58, 59 and/or 60 which correspond to the protein sequences defined in NCBI Protein Accession Reference Sequences NP_001207411.1, NP_002390.1, NP_733774.1, NP_733775.1, NP_733776.1, NP_733777.1, NP_758526.1 and NP_758527.1 respectively, encoding MEIS2 polypeptides. The term “MEIS2” also relates to the amplicon(s) that can be generated by the primer pair MEIS2_forward (SEQ ID NO: 61) and the MEIS2_reverse (SEQ ID NO: 62) and can be detected by probe SEQ ID NO: 63.

[0152] The term “MYBPC1” relates to the Myosin Binding Protein C, Slow Type preferably to one or more of the sequences as defined in NCBI Reference Sequences: NM_001254718.1, NM_001254719.1, NM_001254720.1, NM_001254721.1, NM_001254722.1, NM_001254723.1, NM_002465.3, NM_206819.2, NM_206820.2 and NM_206821.2 more preferably to the nucleotide sequences as set forth in SEQ ID NO: 64, 65, 66,67, 68, 69, 70, 71, 72 and/or 73, respectively, which correspond to the sequences of the above indicated NCBI Reference Sequences of the MYBPC1 transcripts, and also relate to the corresponding amino acid sequence as set forth in SEQ ID NO: 74, 75, 76, 77, 78, 79, 80, 81, 82 and/or 83 which correspond to the protein sequences defined in NCBI Protein Accession Reference Sequences NP_001241647.1, NP_001241648.1, NP_001241649.1, NP_001241650.1, NP_001241651.1, NP_001241652.1, NP_002456.2 ,NP_996555.1, NP_996556.1 and NP_996557.1 respectively, encoding MYBPC1 polypeptides. The term “MYBPC1” also relates to the amplicon(s) that can be generated by the primer pair MYBPC1_forward (SEQ ID NO: 84) and the MYBPC1_reverse (SEQ ID NO: 85) and can be detected by probe SEQ ID NO: 86.

[0153] The term “PAGE4” relates to the P Antigen Family, Member 4 gene, preferably to the sequence as defined in NCBI Reference Sequence: NM_007003.3, more preferably to the nucleotide sequence as set forth in SEQ ID NO: 87, which corresponds to the sequence of the above indicated NCBI Reference Sequence of the PAGE4 transcript, and also relates to the corresponding amino acid sequence as set forth in SEQ ID NO: 88, which corresponds to the protein sequence defined in NCBI Protein Accession Reference Sequence NP_008934.1 encoding the PAGE4 polypeptide. The term “PAGE4” also relates to the amplicon that can be generated by the primer pair PAGE4_forward (SEQ ID NO: 89) and the PAGE4_reverse (SEQ ID NO: 90) and can be detected by probe SEQ ID NO: 91.

[0154] The term “SRD5A2” relates to the Steroid 5-Alpha-Reductase 2 gene, preferably to the sequence as defined in NCBI Reference Sequence: NM_000348.3, more preferably to the nucleotide sequence as set forth in SEQ ID NO: 92, which corresponds to the sequence of the above indicated NCBI Reference Sequence of the SRD5A2 transcript, and also relates to the corresponding amino acid sequence as set forth in SEQ ID NO: 93, which corresponds to the protein sequence defined in NCBI Protein Accession Reference Sequence NP_000339.2 encoding the SRD5A2 polypeptide. The term “SRD5A2” also relates to the amplicon that can be generated by the primer pair SRD5A2_forward (SEQ ID NO: 94) and the SRD5A2_reverse (SEQ ID NO: 95) and can be detected by probe SEQ ID NO: 96.

[0155] The term “COL1A1” relates to the Collagen, Type I, Alpha 1 gene, preferably to the sequence as defined in NCBI Reference Sequence: NM_000088.3, more preferably to the nucleotide sequence as set forth in SEQ ID NO: 97, which corresponds to the sequence of the above indicated NCBI Reference Sequence of the COL1A1 transcript, and also relates to the corresponding amino acid sequence as set forth in SEQ ID NO: 98, which corresponds to the protein sequence defined in NCBI Protein Accession Reference Sequence NP_000079.2 encoding the COL1A1 polypeptide. The term “COL1A1” also relates to the amplicon that can be generated by the primer pair COL1A1_forward (SEQ ID NO: 99) and the COL1A1_reverse (SEQ ID NO: 100) and can be detected by probe SEQ ID NO: 101.

[0156] The term “COL3A1” relates to the Collagen, Type III, Alpha 1gene, preferably to the sequence as defined in NCBI Reference Sequence: NM_000090.3, more preferably to the nucleotide sequence as set forth in SEQ ID NO: 102, which corresponds to the sequence of the above indicated NCBI Reference Sequence of the COL3A1 transcript, and also relates to the corresponding amino acid sequence as set forth in SEQ ID NO: 103, which corresponds to the protein sequence defined in NCBI Protein Accession Reference Sequence NP_000081.1 encoding the COL3A1 polypeptide. The term “COL3A1” also relates to the amplicon that can be generated by the primer pair COL3A1_forward (SEQ ID NO: 104) and the COL3A1_reverse (SEQ ID NO: 105) and can be detected by probe SEQ ID NO: 106.

[0157] The term “COL5A2” relates to the Collagen, Type V, Alpha 2 gene, preferably to the sequence as defined in NCBI Reference Sequence: NM_000393.3, more preferably to the nucleotide sequence as set forth in SEQ ID NO: 107, which corresponds to the sequence of the above indicated NCBI Reference Sequence of the COL5A2 transcript, and also relates to the corresponding amino acid sequence as set forth in SEQ ID NO: 108, which corresponds to the protein sequence defined in NCBI Protein Accession Reference Sequence NP_000384.2 encoding the SRD5A2 polypeptide. The term “COL5A2” also relates to the amplicon that can be generated by the primer pair COL5A2_forward (SEQ ID NO: 109) and the COL5A2_reverse (SEQ ID NO: 110) and can be detected by probe SEQ ID NO: 111.

[0158] The term “INHBA” relates to the Inhibin, Beta A gene, preferably to the sequence as defined in NCBI Reference Sequence: NM_002192.2, more preferably to the nucleotide sequence as set forth in SEQ ID NO: 112, which corresponds to the sequence of the above indicated NCBI Reference Sequence of the INHBA transcript, and also relates to the corresponding amino acid sequence as set forth in SEQ ID NO: 113, which corresponds to the protein sequence defined in NCBI Protein Accession Reference Sequence NP_002183.1 encoding the INHBA polypeptide. The term “INHBA” also relates to the amplicon that can be generated by the primer pair INHBA_forward (SEQ ID NO: 114) and the INHBA_reverse (SEQ ID NO: 115) and can be detected by probe SEQ ID NO: 116.

[0159] The term “THBS2” relates to the Thrombospondin 2 gene, preferably to the sequence as defined in NCBI Reference Sequence: NM_003247.3 more preferably to the nucleotide sequence as set forth in SEQ ID NO: 117, which corresponds to the sequence of the above indicated NCBI Reference Sequence of the THBS2 transcript, and also relates to the corresponding amino acid sequence as set forth in SEQ ID NO: 118, which corresponds to the protein sequence defined in NCBI Protein Accession Reference Sequence NP_003238.2 encoding the THBS2 polypeptide. The term “THBS2” also relates to the amplicon that can be generated by the primer pair THBS2_forward (SEQ ID NO: 119) and the THBS2_reverse (SEQ ID NO: 120) and can be detected by probe SEQ ID NO: 121.

[0160] The term “VCAN” relates to the Versican gene, preferably to one or more of the sequences as defined in NCBI Reference Sequences: NM_001126336.2, NM_001164097.1, NM_001164098.1 and NM_004385.4 more preferably to one or more nucleotide sequences as set forth in SEQ ID NO: 122, 123, 124 and 125, respectively, which correspond to the sequences of the above indicated NCBI Reference Sequences of the VCAN transcripts, and also relates to the corresponding amino acid sequences as set forth in SEQ ID NO: 126, 127, 128 and 129 which correspond to the protein sequences defined in NCBI Protein Accession Reference Sequences NP_001119808.1, NP_001157569.1, NP_001157570.1 and NP_004376.2 respectively, encoding VCAN polypeptides. The term “VCAN” also relates to the amplicon(s) that can be generated by the primer pair VCAN_forward (SEQ ID NO: 130) and the VCAN_reverse (SEQ ID NO: 131) and can be detected by probe SEQ ID NO: 132.

[0161] The term “BNG” relates to the Biglycan gene, preferably to the sequence as defined in NCBI Reference Sequence: NM_001711.4, more preferably to the nucleotide sequence as set forth in SEQ ID NO: 133, which corresponds to the sequence of the above indicated NCBI Reference Sequence of the BNG transcript, and also relates to the corresponding amino acid sequence as set forth in SEQ ID NO: 134, which corresponds to the protein sequence defined in NCBI Protein Accession Reference Sequence NP_001702.1 encoding the BNG polypeptide. The term “BNG” also relates to the amplicon that can be generated by the primer pair BNG_forward (SEQ ID NO: 135) and the BNG_reverse (SEQ ID NO: 136) and can be detected by probe SEQ ID NO: 137.

[0162] The term “BIRC5” relates to the Versican gene, preferably to one or more of the sequences as defined in NCBI Reference Sequences: NM_001012270.1, NM_001012271.1 and NM_001168.2 more preferably to one or more nucleotide sequences as set forth in SEQ ID NO: 138, 139 and 140, respectively, which correspond to the sequences of the above indicated NCBI Reference Sequences of the BIRC5transcripts, and also relates to the corresponding amino acid sequences as set forth in SEQ ID NO: 141, 142, and 143 which correspond to the protein sequences defined in NCBI Protein Accession Reference Sequences NP_001012270.1, NP_001012271.1 and NP_001159.2 respectively, encoding BIRC5polypeptides. The term “BIRC5” also relates to the amplicon(s) that can be generated by the primer pair BIRC5_forward (SEQ ID NO: 144) and the BIRC5_reverse (SEQ ID NO: 145) and can be detected by probe SEQ ID NO: 146.

[0163] The term “DYRK2” relates to the Versican gene, preferably to one or more of the sequences as defined in NCBI Reference Sequences: NM_003583.3 and NM_006482.2 more preferably to one or more nucleotide sequences as set forth in SEQ ID NO: 147 and 148, respectively, which correspond to the sequences of the above indicated NCBI Reference Sequences of the DYRK2 transcripts, and also relates to the corresponding amino acid sequences as set forth in SEQ ID NO: 149 and 150 which correspond to the protein sequences defined in NCBI Protein Accession Reference Sequences NP_003574.1 and NP_006473.2 respectively, encoding DYRK2 polypeptides. The term “DYRK2” also relates to the amplicon(s) that can be generated by the primer pair DYRK2_forward (SEQ ID NO: 151) and the DYRK2_reverse (SEQ ID NO: 152) and can be detected by probe SEQ ID NO: 153.

[0164] In other embodiments the PCPI signature can be an 18-gene list comprising PDE4D instead of PDE4D5 and PDE4D7, or it may comprise the remaining 17 genes. Therefore, in a preferred embodiment, the PCPI signature can be a 17-gene list which comprises the above-mentioned 17 genes and comprises neither PDE4D5 nor PDE4D7.

[0165] In another embodiment, the present invention provides a gene expression prognostic signature comprised of a combination of 19 individual genes which can be measured on extracted RNA from human prostate cancer tissue samples in a quantitative manner. The combination of these features into a single data model (=PCPI->Prostate Cancer Progression Index) provides significantly improved classification power to predict the progression of prostate cancer. In embodiments using either these 19 genes, or 17, 18 or 57, the PCPI referred to in the present invention is used in methods of diagnosing prostate cancer in a sample, prognosticating the patient's individual disease status and expected development of disease, and it provides a parameter in methods for stratifying and/or identifying patients for an individually preferred treatments or therapy, if applicable. Based on the PCPI parameter, the predisposition or likelihood that, e.g., the tumor progresses to aggressive prostate cancer can be determined. For example, if the PCPI obtained in the analysis of a tumor is higher than a defined cut-off (or threshold) level, the probability that said tumor progresses to an aggressive form is also higher, and vice versa.

[0166] The classification step of tumor samples that are analysed according to the methods described herein thus comprises the comparison of PCPI values between samples that have been obtained at a specific time point in the past (e.g. before initial diagnosis of prostate cancer) and samples obtained at a later stage. When the PCPI obtained in the analysis of a tumor sample at said later stage is higher than a defined threshold or cut-off, this parameter can be used as an indication of a progression towards aggressive prostate cancer.

[0167] The cut-off may be defined based on a reference data set comprising patient groups with or without progression. The cut-off may be set for example at 70%, 80%, 85%, 90%, 93%, 95%, 96%, 97%, 98% or 99% sensitivity with regard to classification of patients without or with progression. In a preferred embodiment the cut-off may be set at 90% sensitivity.

[0168] Of course, the PCPI may also be used in methods of establishing a patients' prognosis, in a method for the stratification of the patients into groups for an appropriate treatment, with the aid of which the physician comes to the conclusion that a specific treatment is not appropriate, that a therapy is not (yet) required, or that therapies are no longer needed in view of the patients overall physical condition.

[0169] Embodiments of the present invention thus relate to the identification and use of marker gene (or sequence) expression patterns (or “profiles” or “signatures”) which are clinically relevant to prostate cancer. The marker gene expression profiles, whether embodied in nucleic acid expression, protein expression, or other expression formats, may be used to predict prostate cancer recurrence and/or survival of subjects afflicted with prostate cancer. Particularly, the marker genes are used in establishing the herein described Prostate Cancer Progression Profile (PCPI) that is be used in the identification/classification of patients with an aggressive or indolent disease.

[0170] In the context of the present application, the expression “initial diagnosis” refers to the first or a subsequent diagnosis preceding the date on which one of the methods according to the present invention was performed, and the PCPI was calculated. For example the initial diagnosis may be established for a patient whose prostate tissue material was analyzed for the first time, and preferably before diagnosis of prostate cancer.

[0171] In the context of the present application, the term “predetermined period after initial diagnosis” comprises a period of about 6 months, 1 year, 2 years, 3 years, 4 years, 5 years, 6 years, 7 years, 8 years, 9 years, 10 years, 15 years or 20 years or more. In the context of the present application, the expression “patient with newly diagnosed prostate cancer” refers to an individual who has been diagnosed as having biochemical values, clinical values or PCPI values that confirm or raise suspicion of the presence of prostate cancer cells in a sample taken from this patient for the first time.

[0172] In the context of the present application, the expression “primary treatment for prostate cancer” refers to any known method for the treatment of prostate cancer, i.e. surgery, chemotherapy, treatment with biologicals, radiation therapy, and the like.

[0173] In the context of the present application, the expression “treatment with biologicals” refers to the treatment of prostate cancers with monoclonal antibodies or derivatives thereof, or peptides or fragments thereof that specifically inhibit or block or neutralize biological molecules in vivo as well as in vitro that are implicated in growth, proliferation, maintenance, or in any other metabolic pathway that is used by prostate cancer cells. Monoclonal antibodies directed to established targets include those that are approved for solid tumors such as anti-human EGFR-2 monoclonal antibodies such as trastuzumab, anti-EGFR antibodies such as cituximab and panitumumab and the anti-vascular endothelial growth factor (VEGF) monoclonal antibody bevacizumab.

[0174] In the context of the present application, the expression “biochemical recurrence” refers, e.g., to recurrent biological values of increased PSA indicating the presence of prostate cancer cells in a sample. However, it is also possible to use other markers that can be used in the detection of the presence or that rise suspicion of such presence.

[0175] In the context of the present application, the term “clinical recurrence” refers to the presence of clinical signs or clinical values as measured, for example using the Gleason Score.

[0176] In the context of the present application, the expression “predisposition of prostate cancer that is susceptible to disease progression” refers to a measurable and significant parameter (for example the PCPI), which provides an indication that the likelihood that the patient from whom a sample was investigated will develop aggressive prostate cancer, i.e. after primary treatment of diagnosed prostate cancer, for example by prostatectomy, chemotherapy and/or radiation therapy, prostate cancer cells re-emerged which have a potential for aggressive growth, such as the formation of metastases in the lymph nodes and bones.

[0177] In the context of the present application, the expression “computer implemented method for determining a prognosis of a patient having a prostate cancer” refers to a method wherein software algorithms calculate a PCPI and based thereon provide a prognosis for the patient that is analyzed, wherein this method uses raw data obtained upon measurement of the gene expression level of the genes referred to herein and conversion thereof into a PCPI using the above-described equation.

[0178] In the context of the present application, the methods for diagnosis, prognosis, identification of a predisposition for development or progression of aggressive prostate cancer, the identification of patients suffering from prostate cancer or subject to recurrence of prostate cancer after primary treatment, may be treated with a suitable therapeutic regime on the basis of the results obtained in any of the methods according to the present invention. Thus, for example, if the prognosis is that a patient will develop aggressive prostate cancer based on results determining a predisposition for this type of cancer, the physician may decide whether or not to use any of the available therapies for the treatment of prostate cancer, such as surgery, chemotherapy, radiation therapy, hormone therapy or combinations thereof and the like.

[0179] The methods according to the present invention also provide information with the aid of the PCPI based on which it can be decided whether or not a patient should be subjected to surgery, chemotherapy, radiation therapy, or whether a further biopsy is to be performed. Thus, the PCPI represents an important parameter in establishing an individualized diagnosis, prognosis, allows to identify patients with a predisposition for aggressive prostate cancer, or to stratify the same for the therapy that is best suited for this patient. The PCPI can also be used in combination with other means and methods to establish a diagnosis or prognosis, and to identify or stratify patients as discussed herein. The present invention thus also relates to prostate cancer-specific therapies or treatments as pointed out above for use in the treatment of patients that have been identified as eligible for such therapies on the basis of the PCPI, optionally in combination with other diagnostic or prognostic methods, with a view to selecting the most suitable cancer treatment for said patient. For example, the complete removal of lymph nodes may be an option in the treatment of patients that have been identified or diagnosed or for whom a prognosis has been established using the methods according to the invention, when the PCPI is high compared with a control sample.

[0180] In embodiments of the present invention involving patients, who were treated by prostatectomy after initial clinical diagnosis, the invention includes methods to predict the likelihood or predisposition of prostate cancer recurrence, cancer metastasis, and/or recurrence of elevated PSA levels.

[0181] Further embodiments of the present invention relate to methods to identify, and then use, marker gene (or sequence) expression profiles in a sample which provide prognostic information related to prostate cancer. The expression profiles correlate with (and so are able to discriminate between) patients with good or poor cancer recurrence, cancer metastasis, and/or survival outcomes.

[0182] In embodiments of the present invention a method to identify marker gene expression profiles relevant to cancer recurrence and/or metastasis in prostate cancer afflicted patients is provided.

[0183] In further embodiments of the invention, methods comparing marker gene (or sequence) expression in a sample comprising gene expression analysis in prostate cancer cells from a patient to an identified expression profile, the PCPI, are provided to determine the likely outcome for the patient, for example after prostatectomy, chemotherapy, radiation therapy, etc. In further aspects of these embodiments of the invention, the obtained information may be advantageously used to predict whether a patient will likely benefit from, e.g., surgery to treat prostate cancer or whether a patient will be better off with another type of treatment or need adjuvant treatment in addition to surgery. Patients that will likely benefit from surgery, such as a radical prostatectomy, can be selected on the basis of the expression profile of the patient's prostate sample as disclosed herein, to be free of cancer recurrence and/or metastasis following the surgery. In a further embodiment, a patient that may be expected to not benefit from surgery is one predicted, by the expression profile of the patient's prostate cancer cells as disclosed herein, to develop cancer metastasis following the surgery. By way of example, the recurrence of prostate cancer may be at the same location while metastasis is frequently to a different location or tissue, such as to a lymph node or bone. Further embodiments of the present invention relate to a method to identify a patient, from a population of patients with prostate cancer cells, or following prostatectomy, as belonging to a subpopulation of patients with either a better cancer recurrence and/or survival outcome (such as lower risk of recurrence or metastasis), relative to another subpopulation, or as belonging to a subpopulation with a poorer cancer recurrence and/or survival outcome (such as elevated risk of recurrence or metastasis), relative to another subpopulation. The methods of the invention are thus allowing to stratify patients into subpopulations or subtypes.

[0184] Methods of the present invention relate to embodiments for the identification of patients with prostate cancer, optionally following prostatectomy, as likely to have a better or poorer cancer recurrence, cancer metastasis, and/or survival outcome by assaying for the PCPI disclosed herein. Where previously subjective interpretation of sample obtained from patients (such as that based upon immunohistochemical staining and subjective analysis) may have been used to determine the predisposition for aggressive versus indolent disease and/or treatment of prostate cancer patients, or pre- or post-prostatectomy patients, or prostate cancer patients that have been treated by a different therapy, the present invention introduces an objective index reflecting expression patterns, which may be used alone or in combination with other (subjective and/or objective) criteria to provide a more accurate assessment of patient outcomes, including survival and the recurrence or metastasis of cancer. The methods based on the analysis of the marker gene expression patterns of the invention thus include a means to detect/diagnose prostate cancer, or pre- or post-prostatectomy prognosis, or, more generally, to determine the predisposition to either aggressive or indolent disease pre- or post-primary treatment.

[0185] The PCPI is based on the analysis of more than one marker gene, or expressed sequence, capable of discriminating between prostate cancer stages, or pre- or post-prostatectomy prostate cancer stages with significant accuracy. The expression level(s) of the marker gene(s), or expressed sequence(s) of interest are identified as correlated with outcomes such that the expression level(s) is/are relevant to a determination of the preferred treatment protocols of a patient. Thus, the invention includes embodiments relating to a method to determine the outcome of a subject afflicted with prostate cancer, optionally pre- or post-prostatectomy, by assaying a prostate sample suspected to contain a cancer cell from said patient for expression levels that are correlated with patient outcomes according to the herein disclosed methods. In another embodiment of the invention method to determine the risk of prostate cancer recurrence and/or metastasis in a subject patient are disclosed.

[0186] In methods of the invention, a sample suspected to comprise prostate cancer cells from a patient is analyzed for the expression levels of marker genes disclosed herein. The aggregated expression levels of the marker genes can be compared with the mean or median expression level(s) thereof in a population of prostate cancer cells. This assessment may then be used to determine the risk of prostate cancer recurrence and/or metastasis in the subject from which the sample was obtained when the PCPI is used. The expression levels of the disclosed genes (or expressed sequences) are correlated with a low risk of cancer recurrence and/or metastasis, or a high risk of cancer recurrence and/or metastasis.

[0187] Put differently, the individual marker genes (or expressed sequences) disclosed herein are expressed at higher, or lower, levels (in comparison to normalized expression values in a prostate cancer cell population) such that the deviation is correlated with an higher or lower risk or predisposition for the development of aggressive versus indolent cancer in patients previously diagnosed with prostate cancer, optionally patients that have already been treated specifically for prostate cancer, or de novo diagnosed patients.

[0188] In some embodiments, assaying for expression levels may be performed by use of nucleic acid probes selected that are specifically recognizing the marker genes as disclosed herein. These probes hybridize, under appropriate conditions, and detect expressed sequences as disclosed herein. In embodiments of the present invention, probes can be used to detect a region of sequence amplified from an expressed marker (gene) sequence.

[0189] The detection or determination of expression levels of marker (gene) sequences may be referred to as detecting or determining an expression profile or signature. Expression patterns of the invention comprising disclosed marker gene sequences are identified and used as described herein. For their identification, a large sampling of the gene expression levels in a sample containing prostate cancer cells is obtained through quantifying the expression levels of mRNA. In one embodiment, the invention includes detecting marker gene (or sequence) expression levels by analyzing gene expression from single cells or homogenous cell populations which have been dissected away from, or otherwise isolated or purified from, contaminating cells beyond that possible by a simple biopsy. Since the expression of numerous genes fluctuates between cells from different patients as well as between cells from the same patient sample, multiple data from expression of individual gene sequences are used as reference data to generate models which in turn permit the identification of individual genes and sequences, the expression of which are correlated with particular prostate cancer, or pre- or post-prostatectomy, outcomes, or which allow classifying patients according to their predisposition for aggressive versus indolent cancer. In these methods, the gene expression levels are preferably converted into a PCPI as defined above, using the marker genes of interest referred to in the claims and throughout the present the present application.

[0190] According to the present invention, marker gene expression levels of various genes in these models were then analyzed to identify nucleic acid sequences, the expressions of which are positively, or negatively, correlated, with a prostate cancer, or post-prostate cancer treatment, outcome.

[0191] Preferred embodiments of the present invention is based on the identification of a subset of expressed marker gene sequences in a cell, identified as correlating to outcomes as described herein. An expression pattern or profile of the invention includes a combination of these identified marker sequences (or genes) that are converted into a PCPI. The use of multiple samples for identification of expressed sequences increases the confidence with which a gene is considered to correlate with a prostate cancer recurrence, metastasis, and/or survival outcome. Without sufficient confidence, it remains unpredictable whether a particular gene is actually correlated with an outcome and also unpredictable whether expression of a gene may be successfully used to identify the outcome for a prostate cancer, or pre- or post-prostatectomy, subject or patient. The identified, nucleic acid sequences corresponding to the disclosed marker genes (or expressed sequences) of interest may be selected for assessment as an expression profile to be detected or assessed for its predictive properties.

[0192] A profile of expression levels or PCPI that is highly correlated with one outcome relative to another may be used to assay a prostate cancer cell containing sample from a subject or patient to predict the outcome of the subject from whom the sample was obtained. Such an assay may be used as part of a method to determine the therapeutic treatment for said subject based upon the outcome identified. This correlation provides a molecular determination of prostate cancer recurrence, cancer metastasis, and/or survival outcomes as disclosed herein. Without being bound by theory, and offered to improve understanding of the instant invention, the disclosed molecular determination is more powerful than other molecular indicators related to prostate cancer, such as the determination of prostate serum antigen (PSA) levels. Additional uses of the correlated expression patterns and profiles are in the classification of cells and tissues; determination of diagnosis and/or prognosis; and determination and/or alteration of therapy.

[0193] The ability to discriminate is conferred by the identification of expression of the individual marker gene sequences as relevant and not by the form of the assay used to determine the actual level of expression. The methods of the invention reflect, quantitatively or qualitatively, expression of marker gene sequence(s) in the “transcriptome” (the transcribed fraction of genes in a genome). The nature of the prostate cancer cell containing sample is not limiting, as fresh tissue, freshly frozen tissue, and fixed tissue, such as formalin-fixed paraffin-embedded (FFPE) tissues, may be used in the disclosed methods. In some embodiments, the sample may be that of a needle (core) biopsy or other biopsy.

[0194] For detecting an identified expression pattern or PCPI signature, embodiments of the invention include detecting gene (or sequence) expression patterns by gathering global, or near global, gene expression data from single cells or homogenous cell populations which have been dissected away from, or otherwise isolated or purified from, contaminating cells beyond that possible by a simple biopsy. The expression levels of the marker genes (sequences) in the pattern or profile are then detected or otherwise measured. In other embodiments, a method may only detect or measure the expression levels of the genes (sequences) in the profile without assessment or other determination of the expression of other genes or sequences.

[0195] In an additional aspect, the analysis of expression levels may be performed in combination with, or in place of, other assessments or indicators of prostate cancer. In some embodiments, the analysis is made in combination with a method of determining the grade of prostate cancer in a sample comprising prostate cancer cells from a subject. In other embodiments, the combination is with a method of determining the stage of prostate cancer in the sample. A third possibility is combination with detecting or determining PSA levels in the subject, optionally before a procedure used to isolate the prostate cancer cells. Of course a combination with any one, two, or all three of these representative examples is possible. Whenever more than one type of assessment is used, the result is a multivariate analysis. The invention expressly includes all possible combinations of assessments described herein as multivariate embodiments.

[0196] Generally, any accepted method of assessing prostate cancer grade and/or stage as known to the skilled person may be used. In some cases, the method of determining prostate cancer grade comprises determination of a Gleason Score (or Gleason Grade). In other cases, the method of determining prostate cancer stage comprises a determination according to the American Joint Committee on Cancer (AJCC) tumor staging system for assessing prostate cancer stage. And as described herein, the analysis of gene (sequence) expression levels may be performed in place of or in combination with either the Gleason Score or the AJCC tumor stage determination. In cases of PSA levels, its assessment may be conducted before a prostatectomy which is used to provide a sample comprising prostate cancer cells for use in any method described herein.

[0197] In further embodiments, the invention includes physical and methodological means for detecting the expression of genes (or sequences) disclosed herein. These means may be directed to assaying one or more aspect of the DNA template(s) underlying the expression of the gene (or sequence), of the RNA used as an intermediate to express the gene (or sequence), or of the proteinaceous product expressed by the gene (or sequence).

[0198] While the present invention is described mainly in the context of human prostate cancer, it may be practiced in the context of prostate cancer of any animal known to be potentially afflicted by prostate cancer. Non-limiting examples of animals for the application of the present invention are mammals, particularly those important to agricultural applications (such as, but not limited to, cattle, sheep, horses, and other “farm animals”), animal models of prostate cancer, and animals for human companionship (such as, but not limited to, dogs and cats).

[0199] A gene expression “pattern” or “profile” or “signature” and the corresponding calculated PCPI refers to the relative expression of genes of interest (expressed sequences) between two or more prostate cancer, or pre- or post-prostatectomy, cancer recurrence, metastasis, and/or survival outcomes which expression is correlated with being able to distinguish between the outcomes.

[0200] A “gene” or “expressed sequence” is a polynucleotide that encodes, and expresses in a detectable manner, a discrete product, whether RNA or proteinaceous in nature. It is appreciated that more than one polynucleotide may be capable of encoding a discrete product. The term includes alleles and polymorphisms of a gene or expressed sequence that encodes the same product, or a functionally associated (including gain, loss, or modulation of function) analog thereof, based upon chromosomal location and ability to recombine during normal mitosis.

[0201] The terms “correlate” or “correlation” or equivalents thereof refer to an association between expression of two or more genes and a physiologic state of a prostate cell to the exclusion of one or more other states as identified by use of the methods as described herein. A gene may be expressed at higher or lower levels and still be correlated with one or more prostate cancer, or pre- or post-prostatectomy, state or outcome.

[0202] As used herein, a “marker gene” or “marker gene sequence” the expression of which is analyzed in the context of the present invention, may also be described as a gene of interest (GOI).

[0203] In embodiments of the invention, the strength of expression of a given marker gene (or expressed sequence) is normalized (such as relative to expression of a reference gene that is expressed at relatively constant levels, or the expression of the GOI is measured across all available samples and the expression value is normalized) to provide a normalized value or score for the correlation analysis of the marker gene expression signature (e.g. the PCPI) and other parameter, e.g. clinical data. In many cases, the expression data is normalized, median-centered, and log-transformed as known to the skilled person prior to further use, such as in clustering and discriminant analysis. Where more than one expression level is used (as in the case of a gene expression profile or index, e.g. the PCPI), the values or scores may be summed and then analyzed as an aggregate value for assessing the correlation or conducting classification based on the correlation.

[0204] A “polynucleotide” is a polymeric form of nucleotides of any length, either ribonucleotides or deoxyribonucleotides. This term refers only to the primary structure of the molecule. Thus, this term includes double- and single-stranded DNA and RNA. It also includes known types of modifications including labels known in the art, methylation, “caps”, substitution of one or more of the naturally occurring nucleotides with an analog, and internucleotide modifications such as uncharged linkages (e.g., phosphorothioates, phosphorodithioates, etc.), as well as unmodified forms of the polynucleotide.

[0205] The term “amplify” is used in the broad sense to mean creating an amplification product can be made enzymatically with DNA or RNA polymerases. “Amplification,” as used herein, generally refers to the process of producing multiple copies of a desired sequence, particularly those of a sample. “Multiple copies” mean at least 2 copies. A “copy” does not necessarily mean perfect sequence complementarity or identity to the template sequence. It is possible to further use any sequencing method known in the art to identify the sequences of GOI's.

[0206] The term “corresponding” may refer to, where appropriate, a nucleic acid molecule as sharing a substantial amount of sequence identity with another nucleic acid molecule. Substantial amount means at least 95%, usually at least 98% and more usually at least 99%, and sequence identity is determined using the BLAST algorithm, as described in Altschul et al. (1990), J. Mol. Biol. 215:403-410 (using the published default setting, i.e. parameters w=4, t=17). Methods for amplifying mRNA are generally known in the art, and include reverse transcription PCR (RT-PCR) and those described in U.S. patent application Ser. No. 10/062,857 (filed on Oct. 25, 2001), as well as U.S. Provisional Patent Applications 60/298,847 (filed Jun. 15, 2001) and 60/257,801 (filed Dec. 22, 2000), all of which are hereby incorporated by reference in their entireties as if fully set forth. Another method which may be used is quantitative PCR (or Q-PCR). Alternatively, RNA may be directly labeled as the corresponding cDNA by methods known in the art.

[0207] The term “Cq value” defines that PCR cycle in qRT-PCR (quantitative real-time PCR) where the measured fluorescence crosses for the first time the background fluorescence.

[0208] A “microarray” is a linear or two-dimensional array of discrete regions, each having a defined area, formed on the surface of a generally solid support such as, but not limited to, glass, plastic, or synthetic membrane. The density of the discrete regions on a microarray is determined by the total numbers of immobilized polynucleotides to be detected on the surface of a single solid phase support, such as at least about 50/cm2, at least about 100/cm2, at least about 500/cm2, but below about 1,000/cm2 in some embodiments. The arrays may contain less than about 500, about 1000, about 1500, about 2000, about 2500, or about 3000 immobilized polynucleotides in total. As used herein, a DNA microarray is an array of oligonucleotides or polynucleotides placed on a chip or other surfaces used to hybridize to amplified or cloned polynucleotides from a sample. Because the position of each particular group of polynucleotides in the array is known, the identities of a sample polynucleotides can be determined based on their binding to a particular position in the microarray.

[0209] Because the invention relies upon the identification of genes (or expressed sequences) that are over- or under-expressed, one embodiment of the invention involves determining expression by hybridization of mRNA, or an amplified or cloned version thereof (such as DNA or cDNA), of a sample cell to a polynucleotide that is unique to a particular gene sequence. Polynucleotides of this type may contain at least about 20, at least about 22, at least about 24, at least about 26, at least about 28, at least about 30, or at least about 32 consecutive basepairs of a gene sequence that is not found in other gene sequences. The term “about” as used in the previous sentence refers to an increase or decrease of 1 from the stated numerical value. Other embodiments may use polynucleotides of at least or about 50, at least or about 100, at least about or 150, at least or about 200, at least or about 250, at least or about 300, at least or about 350, or at least or about 400 basepairs of a gene sequence that is not found in other gene sequences. The term “about” as used in the preceding sentence refers to an increase or decrease of 10% from the stated numerical value. Such polynucleotides may also be referred to as polynucleotide probes that are capable of hybridizing to sequences of the genes, or unique portions thereof, described herein. In many cases, the hybridization conditions are stringent conditions of about 30% v/v to about 50% formamide and from about 0.01M to about 0.15M salt for hybridization and from about 0.01M to about 0.15M salt for wash conditions at about 55 to about 65° C. or higher, or conditions equivalent thereto.

[0210] In other embodiments, polynucleotide probes for use in the invention may have about or 95%, about or 96%, about or 97%, about or 98%, or about or 99% identity with the marker gene sequences the expression of which shall be determined. Identity is determined using the BLAST algorithm, as described above. These probes may also be described on the basis of the ability to hybridize to expressed marker genes used in methods of the invention under stringent conditions as described above or conditions equivalent thereto.

[0211] In many cases, the sequences are those of mRNA encoded by the marker genes, the corresponding cDNA to such mRNAs, and/or amplified versions of such sequences. In some embodiments of the invention, the polynucleotide probes are immobilized on an array, other devices, or in individual spots that localize the probes.

[0212] Suitable labels that can be used according to the invention, include radioisotopes, nucleotide chromophores, enzymes, substrates, fluorescent molecules, chemiluminescent moieties, magnetic particles, bioluminescent moieties, and the like. As such, a label is any composition detectable by spectroscopic, photochemical, biochemical, immunochemical, electrical, optical or chemical means. The term “support” refers to conventional supports such as beads, particles, dipsticks, fibers, filters, membranes and silane or silicate supports such as glass slides.

[0213] As used herein, a “prostate tissue sample” or “prostate cancer cell sample” refers to a sample of prostate tissue isolated from an individual, such as one afflicted with prostate cancer. The sample may be from material removed via a prostatectomy, such as a radical prostatectomy. Alternatively, they are obtained by other means, such as needle (core) biopsy or other biopsy techniques, like laterally directed biopsies, the conventional sextant biopsy approach, different combinations of sextant and lateral biopsies as extended techniques, transrectal ultrasound guided prostate biopsy, and others as known to the skilled person. Such samples are primary isolates (in contrast to cultured cells) and may be collected by any suitable means recognized in the art. In some embodiments, the “sample” may be collected by an invasive method, including, but not limited to, surgical biopsy. A sample may contain prostate tumor cells which are isolated by known methods or other appropriate methods as deemed desirable by the skilled practitioner. Isolation methods include, but are not limited to, microdissection, laser capture microdissection (LCM), or laser microdissection (LMD) before use in accordance with the invention. “Expression” and “gene expression” include transcription and/or translation of nucleic acid material. As used herein, the term “comprising” and its cognates are used in their inclusive sense; that is, equivalent to the term “including” and its corresponding cognates.

[0214] Conditions that “allow” an event to occur or conditions that are “suitable” for an event to occur, such as hybridization, strand extension, and the like, or “suitable” conditions are conditions that do not prevent such events from occurring. Thus, these conditions permit, enhance, facilitate, and/or are conducive to the event. Such conditions, known in the art and described herein, depend upon, for example, the nature of the nucleotide sequence, temperature, and buffer conditions. These conditions also depend on what event is desired, such as hybridization, cleavage, strand extension or transcription.

[0215] “Detection” includes any means of detecting, including direct and indirect detection of gene expression and changes therein. For example, “detectably less” products may be observed directly or indirectly, and the term indicates any reduction (including the absence of detectable signal). Similarly, “detectably more” product means any increase, whether observed directly or indirectly.

[0216] “Prostatectomy” refers to the removal of prostate tissue by a skilled clinician, such as a surgeon. Non-limiting examples include radical prostatectomy; open (traditional) prostatectomy (involving an incision through the perineum); laparoscopic prostatectomy; and robotic (nerve sparing) prostatectomy.

[0217] “Gleason score” refers to the grading of a sample of prostate cancer by a trained pathologist according to the Gleason system, which assigns a Gleason score using numbers from 1 to 5 based upon similarities in the cells of a sample of prostate tissue to cancerous tissue or normal prostate tissue. Tissue that looks much like normal prostate tissue is given a score or grade of 1 while a tissue that lacks normal features and the cells seem to be spread haphazardly through the prostate is given a score or grade of 5. Scores, or grades of 2 through 4, inclusive, have features in between these possibilities. But because prostate cancers may have areas with different scores or grades, separate scores or grades are given to the two areas that make up most of the tissue. The two scores or grades are added to yield a Gleason score (or Gleason sum) between 2 and 10.

[0218] The expression levels of the marker genes referred to herein correlate clinical outcomes as described herein and therefore may be used as predictors as described herein. The identified genes have been reported to participate in various cellular functions as outlined in http://csbi.ltdk. Helsinki.fi/anduril/tcga-gbm/table4_2.html. In the methods underlying the embodiments of the present invention, these data were correlated with the putative prognostic gene marker PDE4D7 as described in WO2010131194 and WO2010131195, whose contents are herewith incorporated by reference. In the context of the present invention, those molecular pathways that showed significant correlation were selected for down-stream analysis (FIG. 2).

[0219] In embodiments of the invention, the marker gene expression pattern (or the PCPI) may be correlated to pre- or post-surgery PSA levels, Gleason score and pT stage. The profile also has the ability to stratify samples with Gleason scores of <=6 and 7 into low and high risk of PSA failure. In multivariate analysis with known prognostic factors, the profile was the only predictor that remains statistically significant (p<0.05). Therefore, detection of the profile at biopsy, or in tissue removed during prostatectomy, allows the distinguishing of indolent from aggressive cancers.

[0220] Embodiments of the invention thus relate to the identification and use of gene expression patterns (or profiles or “signatures”) which discriminate between (or are correlated with) prostate cancer survival and recurrence outcomes in a subject. Such patterns may be determined by the methods of the invention by use of a number of reference cell or tissue samples, such as those reviewed by a pathologist of ordinary skill in the pathology of prostate cancer, which reflect prostate cancer cells as opposed to normal or other non-cancerous cells. The outcomes experienced by the subjects from whom the samples may be correlated with expression data to identify patterns that correlate with the outcomes. Because the overall gene expression profile differs from person to person, cancer to cancer, and cancer cell to cancer cell, correlations between certain cells and genes expressed or underexpressed may be made as disclosed herein to identify genes that are capable of discriminating between prostate cancer outcomes.

[0221] In embodiments of the present invention, genes with significant correlations to prostate cancer (or pre- or post-prostatectomy) survival, metastasis, or recurrence outcomes are used to discriminate between outcomes. The patterns or indices are capable of predicting the classification of an unknown sample based upon the expression of the genes used for discrimination in the models.

[0222] In embodiments of the present invention, marker genes (sequences) expressed in correlation with prostate cancer, or pre- or post-prostatectomy/primary treatment, outcomes provide the ability to focus gene expression analysis to only those genes that contribute to the ability to stratify a subject among different outcomes.

[0223] As will be appreciated by those skilled in the art, that the expression patterns (and the PCPI) are highly useful for discriminating between different outcomes in prostate cancer, or pre- or post-prostatectomy, and may be readily performed by the skilled artisan to permit the generation of models as described above to predict the status of an unknown sample based upon the expression levels of those genes.

[0224] To determine the (up-regulated or down-regulated) expression levels of genes (expressed sequences) in the practice of the invention, any method known in the art may be utilized. In some embodiments, expression based on detection of RNA which hybridizes to the genes (or probe sequences) identified and disclosed herein is used. This is readily performed by any RNA detection or amplification+detection method known or recognized as equivalent in the art such as, but not limited to, RNA sequencing, reverse transcription-PCR (RT-PCR), real-time PCR, real-time RT-PCR, the methods disclosed in U.S. patent application Ser. No. 10/062,857 (filed on Oct. 25, 2001) as well as U.S. Provisional Patent Applications 60/298,847 (filed Jun. 15, 2001) and 60/257,801 (filed Dec. 22, 2000), and methods to detect the presence, or absence, of RNA stabilizing or destabilizing sequences.

[0225] Alternatively, expression based on detection of DNA status may be used. Detection of the DNA of an identified gene as methylated or deleted may be used for genes that have decreased expression in correlation with a particular prostate cancer, or pre- or post-prostatectomy, outcome. This may be readily performed by PCR based methods known in the art, including, but not limited to, Q-PCR.

[0226] Conversely, detection of the DNA of an identified gene as amplified may be used for genes that have up-regulated expression in correlation with a particular prostate cancer, or pre- or post-prostatectomy, outcome. This may be readily performed by PCR based, fluorescent in situ hybridization (FISH) and chromosome in situ hybridization (CISH) methods known in the art.

[0227] Expression based on detection of a presence, increase, or decrease in protein levels or activity may also be used, e.g. in addition to calculating a PCPI for an individual sample/patient. Detection may be performed by any immunohistochemistry (IHC) based, blood based (especially for secreted proteins), antibody (including autoantibodies against the protein) based, exfoliate cell (from the cancer) based, mass spectroscopy based, and image (including used of labeled ligand) based method known in the art and recognized as appropriate for the detection of the protein. Antibody and image based methods are additionally useful for the localization of tumors after determination of cancer by use of cells obtained by a non-invasive procedure (such as lavage or needle aspiration), where the source of the cancerous cells is not known. A labeled antibody or ligand may be used to localize the carcinoma(s) within a patient.

[0228] Embodiments of the present invention relating to the use of a nucleic acid based assay to determine expression are accomplished by immobilization of one or more sequences of the marker genes identified herein as a polynucleotide on a solid support, including, but not limited to, a solid substrate as an array or to beads or bead based technology as known in the art. In some embodiments, the assay is DASL (cDNA-mediated Annealing, Selection, extension and Ligation) assay available from IIlumina. Alternatively, solution based expression assays known in the art may also be used. The immobilized polynucleotide probes may be unique or otherwise specific to the disclosed genes (or expressed sequences) such that the polynucleotides are capable of hybridizing to a DNA or RNA corresponding to the genes (or expressed sequences). These polynucleotides may be the full length of the genes (or expressed sequences) or be probes of shorter length (up to one nucleotide shorter than the full length sequence known in the art by deletion from the 5′ or 3′ end of the sequence) that are optionally minimally interrupted (such as by mismatches or inserted non-complementary basepairs) so that their hybridization with cognate DNA or RNA corresponding to the genes (or expressed sequences) is not affected. In many embodiments, a polynucleotide probe contains sequence from the 3′ end of a disclosed gene or expressed sequence. Polynucleotide probes containing mutations relative to the sequences of the disclosed genes may also be used so long as the presence of the mutations still allows hybridization to produce a detectable signal. The immobilized polynucleotides may be used to determine the state of nucleic acid samples prepared from sample prostate cell(s) for which the outcome of the sample's subject (e.g. patient from whom the sample is obtained) is not known or for confirmation of an outcome that is already assigned to the sample's subject. Without limiting the invention, such a cell may be from a patient with prostate cancer, such as material removed by prostatectomy. The immobilized polynucleotide(s) need only be sufficient to specifically hybridize to the corresponding nucleic acid molecules derived from the sample under suitable conditions. While expression of even a single correlated gene may to able to provide adequate accuracy in discriminating between two prostate cancer outcomes, the invention includes use of expression levels from more than one gene or expressed sequence. In particular, the genes (expressed sequences) of the set of 17, 18, 19, or the set of 57 referred to in the examples section (infra), are used.

[0229] In some embodiments, the nucleic acid derived from the sample prostate cancer cell(s) may be preferentially amplified by use of appropriate primers (such as used in PCR) such that only the genes to be analyzed are amplified to reduce contaminating background signals from other expressed genes or sequences in the sample. The size of a PCR amplicon of the invention may be of any size, including at least or about 50, at least or about 100, at least about or 150, at least or about 200, at least or about 250, at least or about 300, at least or about 350, or at least or about 400 consecutive nucleotides, all with inclusion of the portion complementary to the PCR primers used. Of course the PCR may optionally be reverse-transcription coupled PCR (or RT-PCR in the case of RNA starting material) or quantitative PCR, such as real-time PCR, or combinations thereof. Of course RNA from the samples described herein may be prepared and used by means readily known to the skilled person. Alternatively, and where multiple genes are to be analyzed or where very few cells (or one cell) is used, the nucleic acid from the sample may be globally amplified before hybridization to immobilized polynucleotide probes, such as on an array or microarray. Of course RNA, or the cDNA counterpart thereof may be directly labeled and used, without amplification, by methods known in the art. A preferred embodiment of the methods for detection of the herein described marker genes is RNA sequencing.

[0230] The invention provides a more objective set of criteria, in the form of gene expression profiles of a discrete set of marker genes, to discriminate (or delineate) between prostate cancer, or pre- or post-prostatectomy, outcomes, and allows for the prediction of a predisposition for aggressive versus indolent disease. In some embodiments, the assays are used to discriminate between better and poorer outcomes within about 6 months, 1 year, 2 years, 3 years, 4 years, 5 years, 7 years, 10 years, 15 years or even later.

[0231] While better and poorer cancer recurrence, metastasis and/or survival outcomes may be defined relatively in comparison to each other, a “better” outcome or a “good prognosis” may be viewed as one that is better than a 50% chance of cancer recurrence and/or 50% chance of survival after about 60 months post surgical intervention to remove prostate cancer tumor(s). A “better” outcome or a “good prognosis” may also be a better than about 60%, about 70%, about 80% or about 90% cancer recurrence and/or chance of survival about 60 months post surgical intervention. A “poorer” outcome/prognosis may be viewed as a 50% or more chance of cancer recurrence and/or less than 50% chance of survival after about 60 months post surgical intervention to remove prostate cancer tumor(s). The PCPI and the methods according to the invention help classifying patients into those that have the above prognosis.

[0232] The disclosed methods may also be used with solid tissue material. For example, a solid biopsy may be collected and prepared for visualization followed by determination of expression of two or more genes or expressed sequences identified herein to determine the prostate cancer, or pre- or post-prostatectomy, outcome. One means is by use of in situ hybridization with polynucleotide identifying probe(s) for assaying expression of said gene(s).

[0233] In some embodiments, the detection of gene expression from the samples may be by use of a single microarray able to assay gene expression from some or all genes disclosed herein for convenience and accuracy.

[0234] Other uses of the invention include providing the ability to identify prostate cancer cell samples as correlated with particular prostate cancer survival or recurrence outcomes for further research or study. This provides a particular advantage in many contexts requiring the identification of cells based on objective genetic or molecular criteria.

[0235] The materials for use in the methods of the present invention are ideally suited for preparation of kits produced in accordance with well known procedures. The invention thus provides kits comprising agents for the detection of expression of the disclosed genes and sequences for identifying prostate cancer, or pre- or post-prostatectomy, outcomes. Such kits optionally comprise the agent with an identifying description or label or instructions relating to their use in the methods of the present invention, is provided. Such a kit may comprise containers, each with one or more of the various reagents (typically in concentrated form) utilized in the methods, including, for example, pre-fabricated microarrays, buffers, the appropriate nucleotide triphosphates (e.g., dATP, dCTP, dGTP and dTTP; or rATP, rCTP, RGTP and UTP), reverse transcriptase, DNA polymerase, RNA polymerase, and one or more primer complexes of the present invention (e.g., appropriate length poly(T) or random primers linked to a promoter reactive with the RNA polymerase). A set of instructions will also typically be included.

[0236] The methods provided by the invention may also be automated in whole or in part. All aspects of the invention may also be practiced such that they consist essentially of a subset of the disclosed genes to the exclusion of material irrelevant to the identification of prostate cancer recurrence, metastasis, and/or survival outcomes via a cell containing sample.

[0237] In the context of the methods of the present invention, the PCPI is used to diagnose prostate cancer in patients, identify prostate cancer in patients, and to establish a prognosis for prostate cancer patients, to determine the predisposition to develop aggressive versus indolent disease, and to stratify prostate cancer patients so that a decision can be made by the treating physician on how, if at all, a patient should be treated. The PCPI can be used as sole parameter for the above purposes or it can be used in combination with other known diagnostic, prognostic, or stratification methods to provide further support for the physician.

[0238] The term “diagnosing prostate cancer” as used herein means that a patient or individual may be considered to be suffering from a prostate cancer, when the expression level of the GOI'(s) of the present invention is either up-regulated or down-regulated, compared to a control level as defined herein above, preferably if compared to the normal control level as defined herein above so that the PCPI is significantly higher than/different from that found in a control tissue. The term “diagnosing” also refers to the conclusion reached through that comparison process.

[0239] In another embodiment of the present invention, the diagnosis may be combined with the elucidation of additional cancer biomarker expression levels, in particular prostate cancer biomarkers. Several particular prostate cancer biomarkers would be known to the person skilled in the art. For example, the expression of biomarkers like PSA may be tested.

[0240] A prostate cancer may be considered as being diagnosed when the expression level of the GOI's of the present invention is up-regulated or down-regulated, compared to the normal control level as defined herein above and when the PCPI is (significantly higher than the one obtained with control material).

[0241] In a further preferred embodiment a prostate cancer may considered as being diagnosed or a predisposition to develop aggressive vs. indolent disease be determined, if the expression level of the GOI's referred to herein, is up-regulated or down-regulated by a value of between 20% to 80%, preferably by a value of 30%, 40%, 50%, 60% or 70% in a test sample in comparison to a control level, preferably a normalized control level. The control level may either be a normal control level or a cancerous control level, as defined herein above. In a particularly preferred embodiment a prostate cancer may be considered as being diagnosed or a predisposition to develop aggressive vs. indolent disease if the expression level, as defined herein above, is up-regulated or down-regulated by a factor of 1.5- to 10-fold, preferably by a factor of 2- to 5-fold in a test sample in comparison to a control level, in particular a healthy tissue or a benign prostate tumor or very preferably in comparison to prostate cancer tissue of the same patient at initial diagnosis.

[0242] The term “detecting prostate cancer” as used herein means that the presence of a prostate cancer disease or disorder in an organism may be determined or that such a disease or disorder may be identified in an organism. The determination or identification of a prostate cancer disease or disorder may be accomplished by a comparison of the expression level of the GOI's of the present invention and the normal control level as defined herein above, or by determining the PCPI. A prostate cancer may be detected when the expression level of the GOI's is up-regulated or down-regulated in comparison to the normal control level as defined herein above. In a preferred embodiment of the present invention a prostate cancer may be detected if the expression level of the GOI's is similar to an expression level of an established, e.g. independently established, prostate cancer cell or cell line, e.g. a prostate cancer cell line, or a cell line as mentioned herein above.

[0243] The terms “monitoring prostate cancer” and “identifying a subject with a predisposition of prostate cancer that is susceptible to disease progression” (i.e. identification of aggressive disease versus indolent disease), as used herein relates to the accompaniment of a diagnosed or detected prostate cancer disease or disorder, e.g. during or after a treatment procedure or during or after a certain period of time, typically during 2 months, 3 months, 4 months, 6 months, 1 year, 2 years, 3 years, 5 years, 10 years, or any other period of time during or after the start or end of the primary treatment. The term “accompaniment” means that states of disease or the PCPI as defined herein above and, in particular, changes of these states of disease or PCPI may be detected by comparing the expression levels of the GOI's of the present invention in a sample to a normal control level as defined herein above, preferably a control expression level derived from a benign tumor control or a healthy control or to the expression level of an established, e.g. independently established, prostate cancer cell or cell line, e.g. a prostate cancer cell line, or a cell line in any type of periodical time segment, e.g. every week, every 2 weeks, every month, every 2, 3, 4, 5, 6, 7, 8, 9, 10, 11 or 12 month, every 1.5 year, every 2, 3, 4, 5, 6, 7, 8,9 or 10 years, during any period of time, e.g. during 2 weeks, 3 weeks, 1, 2, 3, 4, 5, 6, 7, 8, 9, 10, 11, 12 months, 1.5, 2, 3, 4, 5, 6, 7, 8, 9, 10, 15 or 20 years, respectively. The established, e.g. independently established, prostate cancer cell or cell line giving rise to an additional control level may be derived from samples corresponding to different stages of cancer development, e.g. stages 0 and I to IV of the TNM classification system. In a preferred embodiment of the present invention the term relates to the accompaniment of a diagnosed prostate cancer, e.g. a malignant, hormone- sensitive prostate cancer. The monitoring may also include the detection of the expression of additional genes or genetic elements, e.g. housekeeping genes like GAPDH or PBGD. The present invention also relates to methods of monitoring patients with a view to identify changes in the herein disclosed signature genes using the PCPI as disclosed throughout the specification in order to identify those patients likely developing aggressive prostate cancer. These patients will then be treated as described throughout the specification.

[0244] The term “prognosticating (aggressive) prostate cancer” as used herein refers to the prediction of the course or outcome of a diagnosed or detected aggressive prostate cancer, e.g. during a certain period of time, during a treatment or after a treatment. The term also refers to a determination of chance of survival or recovery from the disease, as well as to a prediction of the expected survival time of a patient. A prognosis may, specifically, involve establishing the likelihood for survival of a patient during a period of time into the future, such as 6 months, 1 year, 2 years, 3 years, 5 years, 10 years or any other period of time.

[0245] The terms “progression towards prostate cancer” and “progression towards aggressive (versus indolent) prostate cancer” as used herein relates to a switch between different stages of cancer development, e.g. stages 0 and Ito IV of the TNM classification, or any other stage or sub-stage, starting from a healthy condition up to malignant, hormone-sensitive or malignant hormone-resistant prostate cancer. Typically such switches are accompanied by a modification of the expression level of marker gene(s) or GOI's and a different PCPI as used herein, in a test sample in comparison to a previous test sample from the same individual, e.g. in comparison to a sample derived from a benign prostate tumor control or a healthy tissue control. A progression towards aggressive prostate cancer may be considered as being detected or diagnosed if the expression level of GOI's used for calculating the PCPI, as defined herein above, is different, e.g. by a value of between 3% to 50%, preferably by a value of 10%, 15%, 20% or 25% in a test sample in comparison to a previous PCPI calculated from the gene expression values in a test sample from the same individual. The modification may be detected over any period of time, preferably over 1, 2, 3, 4, 5, 6, 7, 8, 9, 10, 11, 12 months, 1.5, 2, 3, 4, 5, 6, 7, 8, 9, 10, 15 or 20 years, i.e. the value indicated above may be calculated by comparing the expression level of marker gene(s) or GOI's or the PCPI at a first point in time and at a second point in time after the above indicated period of time.

[0246] In a particularly preferred embodiment of the present invention the term “progression towards prostate cancer” relates to a switch from a healthy state or a benign prostate tumor state to a malignant prostate cancer state. A progression from a healthy state to a prostate cancer state may be considered as being detected or diagnosed if the PCPI, as defined herein above, is higher by a value of between 20% to 50%, preferably by a value of 20%, 25%, 30% or 35% in a test sample in comparison to a previous test sample from the same individual, which was diagnosed as being healthy. Alternatively, for the comparison test samples from other individuals may be used, e.g. test samples of healthy individuals. Also envisaged is the use of available database information on the expression or the employment of cancer cell collection samples etc.

[0247] A progression from a benign prostate tumor state to a malignant prostate cancer state may be considered as being detected or diagnosed if the PCPI, as defined herein above, is higher by a value of between 3% to 30%, preferably by a value of 5%, 10%, 15%, or 20% in a test sample in comparison to a previous test sample from the same individual, which has been diagnosed as suffering from a benign prostate tumor. Alternatively, for the comparison test samples from other individuals may be used, e.g. test samples of individuals diagnosed to suffer from benign prostate tumors. Also envisaged is the use of available database information on the expression or the employment of cancer cell collection samples etc.

[0248] The modification may be detected over any period of time, preferably over 1, 2, 3, 4, 5, 6, 7, 8, 9, 10, 11, 12 months, 1.5, 2, 3, 4, 5, 6, 7, 8, 9, 10, 15 or 20 years, i.e. the value indicated above may be calculated by comparing the expression level of marker gene(s) or GOI's at a first point in time and at a second point in time after the above indicated period of time.

[0249] In a further embodiment the present invention relates to the diagnosis and detection of a predisposition for developing prostate cancer. A “predisposition for developing (aggressive) prostate cancer” in the context of the present invention is a state of risk of developing (aggressive) prostate cancer. Preferably a predisposition for developing aggressive prostate cancer may be present in cases in which the GOI's expression level or the PCPI defined herein above is significantly different from a control level as defined herein, i.e. a reference expression level or reference PCPI derived from tissues or samples of a patient which are evidently healthy, or from a sample or tissues of a patient obtained before initial diagnosis of prostate cancer, so that also the PCPI calculated on the basis of the gene expression in the cancerous tissues is higher than the PCPI obtained for the control sample. Thus, a predisposition for aggressive prostate cancer may be considered as being diagnosed or detected if the above depicted situation is observed.

[0250] Generally, and also in the establishment of the PCPI, the difference between the expression levels of a test biological sample and a control level can be normalized to the expression level of further control nucleic acids, e.g. housekeeping genes whose expression levels are known not to differ depending on the cancerous or noncancerous state of the cell. Exemplary control genes include inter alfa β-actin, glycerinaldehyde 3-phosphate dehydrogenase (GAPDH), porphobilinogen deanimase (PBGD) and the like.

[0251] In the context of the present invention, the terms “diagnosing” and “prognosticating” are also intended to encompass predictions and likelihood analyses. The PCPI as a parameter may accordingly be used clinically in making decisions concerning treatment modalities, including therapeutic intervention or diagnostic criteria such as a surveillance for the disease. According to the present invention, an intermediate result for examining the condition of a patient may be provided. Such intermediate result may be combined with additional information to assist a doctor, nurse, or other practitioner to diagnose that a patient suffers from the disease. Alternatively, the present invention may be used to detect cancerous cells in a patient-derived tissue, and provide a doctor with useful information to diagnose that the patient suffers from the disease.

[0252] A patient or individual to be diagnosed, monitored or in which a prostate cancer, a progression towards aggressive versus indolent prostate cancer or a predisposition for aggressive versus indolent prostate cancer is to be detected or prognosticated according to the present invention is an animal, preferably a mammal, more preferably a human being. The use of molecular imaging tools as known to the person skilled in the art, e.g. magnetic resonance imaging (MRI) and/or magnetic photon resonance imaging (MPI) technology and/or multi-parametric MRI (mpMRI) technology in the in addition to the PCPI as a marker for diagnosing, detecting, monitoring or prognosticating prostate cancer of the progression towards aggressive versus indolent prostate cancer.

[0253] In a further aspect the present invention relates to a composition for diagnosing, detecting, monitoring or prognosticating prostate cancer or the progression towards prostate cancer or a predisposition for prostate cancer in an individual. The composition according to the present invention may comprise a nucleic acid affinity ligand for the GOI expression product(s).

[0254] The term “nucleic acid affinity ligand for the GOI expression product” as used herein refers to a nucleic acid molecule being able to specifically bind to a GOI transcript. The nucleic acid affinity ligand may also be able to specifically bind to a nucleic acid sequence being at least 90%, 91%, 92%, 93%, 94%, 95%, 96%, 97%, 98% or 99% identical to GOI sequences, or to any fragments of said sequences.

[0255] The term “expression product” as used herein refers to a transcript of a GOI or an mRNA molecule generated by the expression of the GOI. More preferably, the term relates to a processed transcript as defined herein above.

[0256] The composition of the present invention may, for example, comprise a set of oligonucleotides specific for the GOI expression products and/or a probe specific for the GOI expression products. The term “oligonucleotide specific for the GOI expression products” as used herein refers to a nucleotide sequence which is complementary to the sense- or antisense-strand of a GOI.

[0257] The oligonucleotide may have any suitable length and sequence known to the person skilled in the art, as derivable from the sequence of the GOI or its complement. Typically, the oligonucleotide may have a length of between 8 and 60 nucleotides, preferably of between 10 and 35 nucleotides, more preferably a length of 11, 12, 13, 14, 15, 16, 17, 18, 19, 20, 21, 22, 23, 24, 25, 26, 27, 28, 29, 30, 31, 32 or 33 nucleotides. Oligonucleotide sequences, for instance, oligonucleotides usable as a forward and reverse primers specific for the GOI expression products may be defined with the help of software tools known to the person skilled in the art.

[0258] The term “probe specific for the GOI expression product” as used herein means a nucleotide sequence which is complementary to the sense- or antisense-strand of the herein described GOI's.

[0259] The probe may have any suitable length and sequence known to the person skilled in the art, as derivable from the sequence of the herein described GOI's. Typically, the probe may have a length of between 6 and 300 nucleotides, preferably of between 15 and 60 nucleotides, more preferably a length of 20, 21, 22, 23, 24, 25, 26, 27, 28, 29, 30, 31, 32, 33, 34, 35, 36, 37, 38, 39, 40, 41, 42, 43, 44, 45, 46, 47, 48, 49 or 50 nucleotides. Probe sequences specific for the GOI's expression product may be defined with the help of software tools known to the person skilled in the art.

[0260] A nucleic affinity ligand, as described herein above, may be labeled with various markers or may be detected by a secondary affinity ligand, labeled with various markers, to allow detection, visualization and/or quantification. This can be accomplished by using any suitable labels, which can be conjugated to the affinity ligand capable of interaction with the expression product or to any secondary affinity ligand, using any suitable technique or methods known to the person skilled in the art. The term “secondary affinity ligand” refers to a molecule which is capable of binding to the affinity ligand as defined herein above (i.e. a “primary affinity ligand” if used in the context of a system with two interacting affinity ligands). The binding interaction is preferably a specific binding.

[0261] Examples of labels that can be conjugated to primary and/or secondary affinity ligands include fluorescent dyes or metals (e.g. fluorescein, rhodamine, phycoerythrin, fluorescamine), chromophoric dyes (e.g. rhodopsin), chemiluminescent compounds (e.g. luminal, imidazole) and bio luminescent proteins (e.g. luciferin, luciferase), haptens (e.g. biotin).

[0262] In embodiments of the present invention, nucleic affinity ligands to be used as probes, in particular a probe specific for the GOI expression products as defined herein above, may be labeled with a fluorescent label like 6-FAM, HEX, TET, ROX, Cy3, Cy5, Texas Red or Rhodamine, and/or at the same time with a quenching label like TAMRA, Dabcyl, Black Hole Quencher, BHQ-I or BHQ-2. A variety of other useful fluorescents and chromophores are described in Stryer, 1968, Science, 162:526-533. Affinity ligands may also be labeled with enzymes (e.g. horseradish peroxidase, alkaline phosphatase, beta-lactamase), radioisotopes (e.g. 3H, 14C, 32P, 33P, 35S, 1251) or particles (e.g. gold). The different types of labels may be conjugated to an affinity ligand using various chemistries, e.g. the amine reaction or the thiol reaction. However, other reactive groups than amines and thiols can also be used, e.g. aldehydes, carboxylic acids and glutamine.

[0263] In a specific embodiment of the present invention a composition may additionally comprise accessory ingredients like PCR buffers, dNTPs, a polymerase, ions like bivalent cations or monovalent cations, hybridization solutions, detection dyes and any other suitable compound or liquid necessary for the performance of a detection as defined herein above, which is known to the person skilled in the art.

[0264] In another aspect the present invention relates to the use of a nucleic acid for the GOI expression product, as defined herein above, for the preparation of a composition for diagnosing, detecting, monitoring or prognosticating prostate cancer or the progression towards aggressive versus indolent prostate cancer or a predisposition for aggressive versus indolent disease in an individual, as described herein above.

[0265] In a preferred embodiment the present invention relates to the use of a set of oligonucleotides specific for the GOI expression products and/or a probe specific for the expression products, as defined herein above, for the preparation of a composition for diagnosing, detecting, monitoring or prognosticating prostate cancer or the progression towards aggressive versus indolent prostate cancer or a predisposition for aggressive versus indolent disease in an individual, as described herein above.

[0266] In a preferred embodiment of the present invention a composition as defined herein above is a diagnostic composition.

[0267] In another aspect the present invention relates to a diagnostic kit for detecting, diagnosing, monitoring or prognosticating prostate cancer or the progression towards prostate cancer or a predisposition for aggressive prostate cancer, comprising a set of oligonucleotides specific for the GOI expression products, a probe specific for the GOI expression products.

[0268] Typically, the diagnostic kit of the present invention contains one or more agents allowing the specific detection of marker gene(s) or GOI's as defined herein above. The agents or ingredients of a diagnostic kit may, according to the present invention, be comprised in one or more containers or separate entities. The nature of the agents is determined by the method of detection for which the kit is intended.

[0269] Furthermore, the kit may comprise an amount of a known nucleic acid molecule, which can be used for a calibration of the kit or as an internal control. Typically, a diagnostic kit for the detection of marker gene(s) or GOI's expression products may comprise accessory ingredients like a PCR buffers, dNTPs, a polymerase, ions like bivalent cations or monovalent cations, hybridization solutions etc. Such ingredients are known to the person skilled in the art and may vary depending on the detection method carried out. Additionally, the kit may comprise an instruction leaflet and/or may provide information as to the relevance of the obtained results.

[0270] In other aspects the present invention relates to methods for detecting, diagnosing, monitoring or prognosticating prostate cancer or the progression towards aggressive versus indolent prostate cancer, e.g. in an individual, comprising at least the step of determining the level of marker gene(s) or GOI's in a sample. The term “determining the level of marker gene(s) or GOI's” refers to the determination of the presence or amount of marker gene(s) or GOI's expression products. The term “level of marker gene(s) or GOI's” thus means the presence or amount of marker gene(s) or GOI's expression products, e.g. transcript(s), and/or the determination of the presence or amount of marker gene(s) or GOI's. The determination of the presence or amount of marker gene(s) or GOI's expression products, may be accomplished by any means known in the art.

[0271] In a preferred embodiment of the present invention the determination of the presence or amount of marker gene(s) or GOI's expression products is accomplished by the measurement of nucleic acid. Thus, the expression level(s) may be determined by a method involving the detection of an mRNA encoded by the gene.

[0272] For example, the measurement of the nucleic acid level of marker gene(s) or GOI's expression may be assessed by purification of nucleic acid molecules (e.g. RNA or cDNA) obtained from the sample, followed by hybridization with specific oligonucleotide probes as defined herein above. Comparison of expression levels may be accomplished visually or by means of an appropriate device. Methods for the detection of mRNA or expression products are known to the person skilled in the art.

[0273] Alternatively, the nucleic acid level of marker gene(s) or GOI's expression may be detected in a DNA array or microarray approach. Typically, sample nucleic acids derived from patients to be tested are processed and labeled, preferably with a fluorescent label. Subsequently, such nucleic acid molecules may be used in a hybridization approach with immobilized capture probes corresponding to the marker genes of the present invention. Suitable means for carrying out microarray analyses are known to the person skilled in the art.

[0274] In a standard setup a DNA array or microarray comprises immobilized high-density probes to detect a number of genes. The probes on the array are complementary to one or more parts of the sequence of the marker genes. Typically, cDNAs, PCR products, and oligonucleotides are useful as probes.

[0275] A DNA array- or microarray-based detection method typically comprises the following steps: (1) Isolating mRNA from a sample and optionally converting the mRNA to cDNA, and subsequently labeling this RNA or cDNA. Methods for isolating RNA, converting it into cDNA and for labeling nucleic acids are described in manuals for micro array technology. (2) Hybridizing the nucleic acids from step 1 with probes for the marker genes. The nucleic acids from a sample can be labeled with a dye, such as the fluorescent dyes Cy3 (red) or Cy5 (blue). Generally a control sample is labeled with a different dye. (3) Detecting the hybridization of the nucleic acids from the sample with the probes and determining at least qualitatively, and more particularly quantitatively, the amounts of mRNA in the sample for marker genes investigated. The difference in the expression level between sample and control can be estimated based on a difference in the signal intensity. These can be measured and analyzed by appropriate software such as, but not limited to the software provided for example by Affymetrix.

[0276] There is no limitation on the number of probes corresponding to the marker genes used, which are spotted on a DNA array. Also, a marker gene can be represented by two or more probes, the probes hybridizing to different parts of a gene. Probes are designed for each selected marker gene. Such a probe is typically an oligonucleotide comprising 5-50 nucleotide residues. Longer DNAs can be synthesized by PCR or chemically. Methods for synthesizing such oligonucleotides and applying them on a substrate are well known in the field of micro-arrays. Genes other than the marker genes may be also spotted on the DNA array. For example, a probe for a gene whose expression level is not significantly altered may be spotted on the DNA array to normalize assay results or to compare assay results of multiple arrays or different assays.

[0277] Alternatively, the nucleic acid level of marker gene(s) or GOI's expression may be detected in a quantitative RT-PCR approach, preferably in a real-time PCR approach following the reverse transcription transcripts of interest. Typically, as first step, a transcript is reverse transcribed into a cDNA molecule according to any suitable method known to the person skilled in the art. A quantitative or real-time PCR approach may subsequently be carried out based on a first DNA strand obtained as described above.

[0278] Preferably, Taqman or Molecular Beacon probes as principal FRET-based probes of this type may be used for quantitative PCR detection. In both cases, the probes, serve as internal probes which are used in conjunction with a pair of opposing primers that flank the target region of interest, preferably a set of marker gene(s) specific oligonucleotides as defined herein above. Upon amplification of a target segment, the probe may selectively bind to the products at an identifying sequence in between the primer sites, thereby causing increases in FRET signaling relative to increases in target frequency.

[0279] Preferably, a Taqman probe to be used for a quantitative PCR approach according to the present invention may comprises a specific oligonucleotide as defined above of about 22 to 30 bases that is labeled on both ends with a FRET pair. Typically, the 5′ end will have a shorter wavelength fluorophore such as fluorescein (e.g. FAM) and the 3′ end is commonly labeled with a longer wavelength fluorescent quencher (e.g. TAMRA) or a non-fluorescent quencher compound (e.g. Black Hole Quencher). It is preferred that the probes to be used for quantitative PCR, in particular probes as defined herein above, have no guanine (G) at the 5′ end adjacent to the reporter dye in order to avoid quenching of the reporter fluorescence after the probe is degraded.

[0280] A Molecular Beacon probe to be used for a quantitative PCR approach according to the present invention preferably uses FRET interactions to detect and quantify a PCR product, with each probe having a 5′ fluorescent-labeled end and a 3′ quencher-labeled end. This hairpin or stem-loop configuration of the probe structure comprises preferably a stem with two short self-binding ends and a loop with a long internal target-specific region of about 20 to 30 bases.

[0281] Alternative detection mechanisms which may also be employed in the context of the present invention are directed to a probe fabricated with only a loop structure and without a short complementary stem region. An alternative FRET -based approach for quantitative PCR which may also be used in the context of the present invention is based on the use of two hybridization probes that bind to adjacent sites on the target wherein the first probe has a fluorescent donor label at the 3′ end and the second probe has a fluorescent acceptor label at its 5′ end.

[0282] In yet another embodiment as a further, additional step a decision on the presence or stage of cancer or the progression of cancer may be based on the results of a comparison step. A malignant, hormone-sensitive prostate cancer may be diagnosed or prognosticated or a progression towards (aggressive) prostate cancer may be diagnosed or prognosticated in said method according to the corresponding definitions provided herein above in the context of marker gene(s) or GOI's as marker for malignant prostate cancer.

[0283] In another embodiment the present invention relates to a method for detecting, diagnosing, monitoring or prognosticating (aggressive) prostate cancer or the progression towards (aggressive) prostate cancer comprising at least the steps of:

[0284] (a) testing in at least one sample obtained from at least one individual suspected to suffer from prostate cancer for expression level of the GOI expression products;

[0285] (b) testing in at least one control sample for the expression level of the GOI expression product;

[0286] (c) determining the difference in the expression of steps (a) and (b); and

[0287] (d) deciding on the presence or stage of prostate cancer or the progression towards aggressive prostate cancer based on the results obtained in step (c).

[0288] In one embodiment, steps a), b), c) and/or d) of this method of diagnosis may be performed outside the human or animal body, e.g. in samples obtained from a patient or individual.

[0289] In another aspect the present invention relates to a method for diagnosing, monitoring or prognosticating, e.g. aggressive, prostate cancer or the progression towards aggressive prostate cancer, wherein said method discriminates between a benign and aggressive prostate cancer, comprising the steps of

[0290] (a) determining the level of marker gene(s) or GOI's,

[0291] (b) determining the level of expression of a reference gene in a sample;

[0292] (c) normalizing the measured expression level of marker gene(s) or GOI's to the expression of the reference gene; and

[0293] (d) comparing the normalized expression level with a predetermined cutoff value chosen to exclude benign prostate tumor, wherein a normalized expression level above the cutoff value is indicative of a aggressive prostate cancer, wherein said cutoff value is between −2 and +2, preferably about 0.

[0294] Expression results may be normalized according to any suitable method known to the person skilled in the art. Typically, such tests or corresponding formula, which would be known to the person skilled in the art, would be used to standardize expression data to enable differentiation between real variations in gene expression levels and variations due to the measurement processes. For microarrays, the Robust Multi-array Average (RMA) may be used as normalization approach.

[0295] In a specific embodiment the normalized values are generated by applying the following:

N(Cq_{gene of interest})=Mean (Cq_{ref gene})−(Cq_{gene of interest})

[0296] Where N(Cq_{gene of interest}) is normalized gene expression value for selected genes of interest; where Mean(Cq_{ref gene}) is the arithmetic mean of the PCR Cq values of the selected combination of reference genes; where (Cq_{gene of interest}) is the PCR Cq value of the gene of interest.

[0297] In a specific embodiment the normalized values are generated by applying the following:

N(Cq_{gene of interest})=Mean(Cq_{ref gene})−(Cq_{gene of interest})

[0298] Where N(Cq_{gene of interest}) is normalized gene expression value for selected genes of interest; where Mean(Cq_{ref gene}) is the arithmetic mean of the PCR Cq values of the of at least two reference genes selected from TBP, HPRT1, ACTB, RPLP0, POLR2A, B2M, PUM1, K-ALPHA-1 and ALAS-1; where (Cq_{gene of interest}) is the PCR Cq value of the gene of interest.

[0299] In a specific embodiment the normalized values are generated by applying the following:

N(Cq_{gene of interest})=Mean(Cq_{ref gene})−(Cq_{gene of interest})

[0300] Where N(Cq_{gene of interest}) is normalized gene expression value for selected genes of interest; where Mean(Cq_{ref gene}) is the arithmetic mean of the PCR Cq values of the reference genes TBP, HPRT1, ACTB and RPLP0; where (Cq_{gene of interest}) is the PCR Cq value of the gene of interest.

[0301] In a specific embodiment the normalized values are generated by applying the following:

N(Cq_{gene of interest})=Mean(Cq_{ref gene})−(Cq_{gene of interest})

[0302] Where N(Cq_{gene of interest}) is normalized gene expression value for selected genes of interest; where Mean(Cq_{ref gene}) is the arithmetic mean of the PCR Cq values of the of the reference genes TBP, HPRT1, PUM1, K-ALPHA-1 and ALAS-1 where (Cq_{gene of interest}) is the PCR Cq value of the gene of interest.

[0303] Exemplary reference genes include inter alia Homo sapiens TATA box binding protein (TBP), Homo sapiens hypoxanthine phosphoribosyltransferase 1 (HPRT1), Homo sapiens actin, beta, mRNA (ACTB), Homo sapiens 60S acidic ribosomal phosphoprotein PO mRNA (RPLP0), Homo sapiens pumilio RNA-Binding Family Member (PUM1), Polymerase (RNA) II (DNA Directed) Polypeptide A, 220kDa (POLR2A), Beta-2-Microglobulin (B2M), Tubulin-Alpha-1b (K-ALPHA-1), Aminolevulinate-Delta-Synthase (ALAS-1).

[0304] In a preferred embodiment a combination of reference genes is selected from TATA box binding protein (TBP), Homo sapiens hypoxanthine phosphoribosyltransferase 1 (HPRT1), Homo sapiens actin, beta, mRNA (ACTB), Homo sapiens 60S acidic ribosomal phosphoprotein PO mRNA (RPLP0), Homo sapiens pumilio RNA-Binding Family Member (PUM1), Polymerase (RNA) II (DNA Directed) Polypeptide A, 220kDa (POLR2A), Beta-2-Microglobulin (B2M), Tubulin-Alpha-1b (K-ALPHA-1), Aminolevulinate-Delta-Synthase (ALAS-1).

[0305] In a specific embodiment the expression level of the signature gene is normalized to the expression of a reference gene, wherein the reference gene is preferably a housekeeping gene and wherein the housekeeping gene is preferably TBP, HPRT1, ACTB, RPLP0, PUM1, POLR2A or B2M.

[0306] In another preferred embodiment the combination of reference genes comprises TBP, HPRT1 and at least one, at least two or at least three additional reference genes selected from the group comprising ACTB, RPLP0, PUM1, POLR2A, B2M, K-ALPHA-1 (TUBA1B) or ALAS-1.

[0307] In another preferred embodiment the combination of reference genes comprises TBP, HPRT1 and at least two additional reference genes selected from the group comprising ACTB, RPLP0, PUM1, K-ALPHA-1 (TUBA1B) or ALAS-1.

[0308] A particularly preferred combination is TBP, HPRT1, ACTB, RPLP0. Another particularly preferred combination is TBP, HPRT1, PUM1, K-ALPHA-1, ALAS-1.

[0309] A detailed description of the reference genes including their Transcript ID (NCBI RefSeq) and the SEQ ID NO of the corresponding nucleotide sequence, the protein ID (protein accession) and the SEQ ID NO of the corresponding amino acid sequence is disclosed in FIG. 10. Further FIG. 10 discloses for each reference gene a forward primer, reverse primer for the generation of an amplicon which is specific for the reference gene and a probe sequence that specifically binds to the amplicon. The expression level of marker gene(s) or GOI's may be determined on the nucleic acid, as described herein above. Preferred is the determination of the expression level of marker gene(s) or GOI's transcript(s). In addition the level of a house-keeping gene in sample may be determined.

[0310] The term “reference gene” as used herein refers to any suitable gene, e.g. to any steadily expressed and continuously detectable gene, gene product, expression product, protein or protein variant in the organism of choice.

[0311] The expression may be preferably be carried out in the same sample, i.e. the level of marker gene(s) or GOI's and of the reference gene is determined in the same sample. If the testing is carried out in the same sample, a single detection or a multiplex detection approach as described herein may be performed. For the performance of the multiplex detection the concentration of primers and/or probe oligonucleotides may be modified. Furthermore, the concentration and presence of further ingredients like buffers, ions etc. may be modified, e.g. up-regulated or down-regulated or decreased in comparison to manufacturers' indications.

[0312] Furthermore, expression results may be compared to already known results from reference cases or databases. The comparison may additionally include a normalization procedure in order to improve the statistical relevance of the results.

[0313] Expression results may be normalized according to any suitable method known to the person skilled in the art, e.g. according to normalization statistical methods like the standard score, Student's T-test, studentized residual test, standardized moment text, or coefficient variation test. Typically, such tests or corresponding formula, which would be known to the person skilled in the art, would be used to standardize expression data to enable differentiation between real variations in gene expression levels and variations due to the measurement processes.

[0314] Based on the expression results obtained in steps (a) and (b) and/or the normalized results obtained in step (c) a comparison with a cutoff value for GOI expression levels may be carried out. The cutoff value above which the expression level of marker gene(s) or GOI's is indicative of an aggressive prostate cancer, thereby excluding benign prostate tumor forms or healthy situations or healthy tissue forms, is between about −3 and +3, −3 and +2.75, −3 and +2.5, −3 and +2.25, −3 and +2, −3 and +1.75, −3 and +1.5, −3 and +1.25, −3 and +1, −3 and +0.75, −3 and +0.5, −3 and +0.25, −3 and 0, −2.75 and +3, −2.5 and +3, −2.25 and +3, −2 and +3, −1.75 and +3, −1.5 and +3, −1.25 and +3, −1 and +3, −0.75 and +3, −0.5 and +3, −0.25 and +3, or 0 and +3. More preferred is a cutoff value of about 0, e.g. 0.9, 0.8, 0.7, 0.6, 0.5, 0.4, 0.3, 0.2, 0.1 or −0.9, −0.8, −0.7, −0.6, −0.5, −0.4, −0.3, −0.2, or −0.1.

[0315] If the measured and/or normalized expression levels is below the indicated cutoff value this may be seen as an indication that the individual is either healthy with respect to prostate tumors or suffers only from benign prostate tumors, but not from aggressive prostate cancer.

[0316] In another aspect the present invention relates to a method of data acquisition comprising at least the steps of:

[0317] (a) testing in an individual for expression of marker gene(s) or GOI's; and

[0318] (b) comparing the expression as determined in step (a) to a control level. The testing for expression of marker gene(s) or GOI's may be carried out according to steps as defined herein above. Preferably the testing may be carried out as measurement of nucleic acid of marker gene(s) or GOI's. The testing may be carried out in an individual, i.e. in vivo, or outside the individual, i.e. ex vivo or in vitro. The term “control level” as used in the context of the method of data acquisition refers to the expression of the marker genes referred to herein or other suitable markers in a normal control or a cancerous control, as defined herein above. The status, nature, amount and condition of the control level may be adjusted according to the necessities. Preferably a normal, healthy control level may be used. A comparison of the expression to a control level may be carried out according to any suitable method of assessing, calculating, evaluating or processing of data and particularly aims at the detection of differences between two data sets. A statistical evaluation of the significance of the difference may further be carried out. Suitable statistical methods are known to the person skilled in the art. Obtained data and information may be stored, accumulated or processed by suitable informatics or computer methods or tools known to the person skilled in the art and/or be presented in an appropriate manner in order to allow the practitioner to use the data for one or more subsequent deduction or conclusion steps.

[0319] In addition the level of a reference gene as defined herein above in a sample may be determined. Alternatively, the determination of the reference gene may be carried out with any other suitable agent or be combined with the detection of the presence or amount of nucleic acids as described herein.

[0320] In a further aspect the present invention relates to a method of identifying an individual for eligibility for prostate cancer therapy comprising:

[0321] (a) testing in a sample obtained from an individual for the expression of marker gene(s) or GOI's;

[0322] (b) testing in said sample for the expression of a reference gene and/or testing in a control sample for the expression of marker gene(s) or GOI's;

[0323] (c) classifying the levels of expression of step (a) relative to levels of step (b); and calculating respective PCPI's,

[0324] (d) identifying the individual as eligible to receive a prostate cancer therapy where the individual's sample is classified as having an up-regulated or down-regulated level of marker gene(s) or GOI's expression or an PCPI that is indicative of aggressive disease.

[0325] The term “classifying the levels of expression of step (a) relative to levels of step (b)” as used herein means that the expression in a test sample for GOI's and the expression in a control sample for GOI's are compared, e.g. after normalization against a suitable normalization references and/or after calculating respective PCPI's.

[0326] According to the calculation of the PCPI's an individual may be considered to be eligible for a prostate cancer therapy when the gene expression levels are significantly different as compared with a control sample.

[0327] The term “stratifying an individual or cohort of individuals to prostate cancer therapy” as used herein means that an individual is identified as belonging to a group of similar individuals, whose optimal therapy form is a prostate cancer therapy, e.g. a therapy in accordance with the outcome of the calculation of the PCPI as described herein above.

[0328] An individual being considered to be eligible for prostate cancer therapy or being stratified to a prostate cancer therapy as described herein above may receive any suitable therapeutic treatment for this prostate cancer form known to the person skilled the art. In particular, the term “prostate cancer therapy” as used herein refers to any suitable prostate cancer therapy known to the person skilled in the art, and preferably includes surgical castration by removal of the testes as the main organ of male sex hormone production, chemical castration by e.g., hormone therapy such as suppression of generation of androgens or by inhibition of the androgen receptor activity, cytotoxic, chemotherapy, radiation therapy (External Beam Radiation Therapy, Brachytherapy), cryotherapy, focal therapies like HIFU ablation (High Frequency Ultrasound ablation), or thermal ablation or combinations thereof, preferably the combination of hormone therapy and radiation therapy.

[0329] Typically, an individual considered to be eligible for prostate cancer therapy may be deemed to be suffering from (aggressive) prostate cancer or be prone to develop such in the future, e.g. within the next 1 to 24 months. A correspondingly identified or stratified individual may be treated with an inhibitory pharmaceutical composition. In a further embodiment a correspondingly identified individual may be treated with an inhibitory pharmaceutical composition in combination with an additional cancer therapy. The term “additional cancer therapy” refers to any types of cancer therapy known to the person skilled in the art. Preferred are cancer therapy forms known for prostate cancer. The term includes, for example, all suitable forms of chemotherapy, radiation therapy, surgery, antibody therapies etc.

[0330] Alternatively, a correspondingly identified or stratified individual may also be treated solely with one or more cancer therapies such as a chemotherapy, radiation therapy, surgery, antibody therapies etc. Preferred are cancer therapies typically used for prostate cancer, more preferred cancer therapies used for aggressive prostate cancer.

[0331] In a further embodiment of the present invention the classification method for eligibility or for stratification as described herein above may also be used for monitoring the treatment of an individual, e.g. an individual being classified as suffering from an aggressive prostate cancer. The monitoring process may be carried out as expression determination over a prolonged period of time, e.g. during or after treatment sessions, for 1, 2, 3, 4, 5, 6, 7, 8, 9, 10 weeks, 1, 2, 3, 4, 5, 6, 7, 8, 9, 10 months, or 1, 2, 3 or more years. The determination steps may be carried out in suitable intervals, e.g. every week, 2 weeks, 3 weeks, every month, 2 months, 3 months, 6 months, 12 months etc. In a further embodiment of the present invention any treatment scheme as mentioned herein above may be adjusted, e.g. enforced or attenuated, or altered in any suitable manner in correspondence with the results of the monitoring process.

[0332] In a further embodiment of the present invention the method of identifying an individual for eligibility for aggressive prostate cancer therapy based on the expression of marker gene(s) or GOI's and the corresponding PCPI as described herein above may further be combined with one or more similar identification methods, based on the expression of one or more different biomarkers. Preferred is the determination of the level of prostate specific antigen (PSA) in blood. Thus, if the level of PSA in blood is encountered to be of a range of about 2 to 5 or more ng/ml, preferably of about 2.2 to 4.8 ng/ml or more, 2.4 to 4.4 ng/ml or more, 2.6 to 4.2 ng/ml ore more or 2.8 to 4.0 ng/ml or more, more preferably of about 2.5 to 4 ng/ml or more, an individual may be considered to be suffering from malignant prostate cancer, or be likely to develop malignant prostate cancer in the near future, i.e. within the next 1, 2, 3, 4, 5, 6, 12, 14, 48 months. The testing for expression of marker gene(s) or GOI's and determination of the PCPI may be carried out according to steps as defined herein above.

[0333] In a preferred embodiment of the present invention the diagnosing, detecting, monitoring or prognosticating as mentioned above is to be carried out on a sample obtained from an individual. The term “sample obtained from an individual” as used herein relates to any biological material obtained via suitable methods known to the person skilled in the art from an individual. The sample used in the context of the present invention should preferably be collected in a clinically acceptable manner, more preferably in a way that nucleic acids (in particular RNA) or proteins are preserved.

[0334] The biological samples may include body tissues and fluids, such as blood, sweat, and urine. Furthermore, the biological sample may contain a cell extract derived from or a cell population including an epithelial cell, preferably a cancerous epithelial cell or an epithelial cell derived from tissue suspected to be cancerous. Even more preferably the biological sample may contain a cell population derived from a glandular tissue, e.g. the sample may be derived from the prostate of a male individual. Additionally, cells may be purified from obtained body tissues and fluids if necessary, and then used as the biological sample.

[0335] Samples, in particular after initial processing, may be pooled. However, also non-pooled samples may be used.

[0336] In a specific embodiment of the present invention the content of a biological sample may also be submitted to an enrichment step. For instance, a sample may be contacted with ligands specific for the cell membrane or organelles of certain cell types, e.g. prostate cells, functionalized for example with magnetic particles. The material concentrated by the magnetic particles may subsequently be used for detection and analysis steps as described herein above or below.

[0337] In a specific embodiment of the invention, biopsy or resections samples may be obtained and/or used. Such samples may comprise cells or cell lysates.

[0338] Furthermore, cells, e.g. tumor cells, may be enriched via filtration processes of fluid or liquid samples, e.g. blood, urine, etc. Such filtration processes may also be combined with enrichment steps based on ligand specific interactions as described herein above.

[0339] In a particularly preferred embodiment of the present invention a sample may be a tissue sample, a biopsy sample, a urine sample, a urine sediment sample, a blood sample, a saliva sample, a semen sample, a sample comprising circulating tumor cells, or a sample containing prostate secreted exosomes. A blood sample, may, for example, be a serum sample or a plasma sample.

[0340] In the treatment of prostate cancer compounds or pharmaceutical compositions being active against cancer cells can be used. The pharmaceutical composition may comprise hormone-inhibitors, preferably anti-androgens or androgen antagonists like spironolactone, cyproterone acetate, flutamide, nilutamide, bicalutamide, ketoconazole, finasteride or dutasteride.

[0341] In a further specific embodiment the present invention envisages a method of monitoring the development of prostate cancer, which encompasses the determination of marker gene(s) or GOI's, preferably in combination with the determination of a reference gene as described herein above, over a certain period of time, i.e. after repeated determination steps, e.g. every 4 weeks, 6 weeks, two months, 4 months, 6 months, 8 months, 12 months, 1.5 years, 2 years, 2.5 years, 3 years, 4 years or any other suitable period of time etc. The method may provide data showing an increase or decrease of the level of marker gene(s) or GOI's in comparison to controls, e.g. non-cancerous controls, cancerous controls or to earlier data obtained from the same individual. With the help of suitable statistical methods known to the person skilled in the art the position within said curve may be determined. In dependence of the position within said curve, i.e. in an augmenting portion or a falling portion of said curve, the presence or future development prostate cancer may be diagnosed. Correspondingly, the use of pharmaceutical compositions is envisaged. Preferably, any such determination may be combined with the determination of secondary biomarkers, e.g. markers for prostate cancer, in particular PSA. In case of low PSA levels (up to 2.0 to 4.0 ng/ml) the GOI data may be analyses with respect to early prostate cancer, i.e. benign or hormone-dependent/hormone-sensitive prostate cancer. In case of higher PSA levels (higher than about 20 ng/ml, e.g. about 30, 40 or 50 ng/ml) the data may be analysed with respect to more advanced prostate cancer, e.g. hormone-resistant prostate cancer.

[0342] A “hormone-sensitive stage I to IV prostate cancer” as used herein denotes a prostate cancer which can be classified according to the TNM classification by the International Union Against Cancer (UICC) into stages I to IV.

[0343] A “hormone-sensitive recurrent prostate cancer” as used herein denotes a prostate cancer whose growth and progression is regulated and dependent on a male sex hormone. A preferred example of such a male sex hormone is an androgen.

[0344] A “hormone-sensitive metastatic prostate cancer” as used herein denotes prostate cancer whose growth and progression regulated and dependent on a male sex hormone. A preferred example of such a male sex hormone is androgen.

[0345] A “hormone-insensitive prostate cancer” as used herein denotes prostate cancer whose growth and progression is not regulated and independent on a male sex hormone. A preferred example of such a male sex hormone is androgen.

[0346] A further aspect of the invention relates to a computer program product, comprising computer readable code stored on a computer readable medium or downloadable from a communications network, which, when run on a computer, implement one or more steps or all the steps of any one of the methods as described herein.

[0347] Any combination of one or more computer readable medium(s) may be utilized. The computer readable medium may be a computer readable signal medium or a computer readable storage medium. A computer readable storage medium may be, for example, but not limited to, an electronic, magnetic, optical, electromagnetic, infrared, or semiconductor system, apparatus, or device, or any suitable combination of the foregoing. More specific examples (a non-exhaustive list) of the computer readable storage medium would include the following: an electrical connection having one or more wires, a portable computer diskette, a hard disk, a random access memory (RAM), a read-only memory (ROM), an erasable programmable read-only memory (EPROM or Flash memory), an optical fiber, a portable compact disc read-only memory (CD-ROM), an optical storage device, a magnetic storage device, or any suitable combination of the foregoing. In the context of this document, a computer readable storage medium may be any tangible medium that can contain, or store a program for use by or in connection with an instruction execution system, apparatus, or device.

[0348] A computer readable signal medium may include a propagated data signal with computer readable program code embodied therein, for example, in baseband or as part of a carrier wave. Such a propagated signal may take any of a variety of forms, including, but not limited to, electro-magnetic, optical, or any suitable combination thereof. A computer readable signal medium may be any computer readable medium that is not a computer readable storage medium and that can communicate, propagate, or transport a program for use by or in connection with an instruction execution system, apparatus, or device.

[0349] Program code embodied on a computer readable medium may be transmitted using any appropriate medium, including but not limited to wireless, wireline, optical fiber cable, RF, etc., or any suitable combination of the foregoing.

[0350] Computer program code for carrying out operations for aspects of the present invention may be written in any combination of one or more programming languages, including an object oriented programming language such as Java, Smalltalk, C++ or the like and conventional procedural programming languages, such as the “C” programming language or similar programming languages. The program code may execute entirely on the user's computer, partly on the user's computer, as a stand-alone software package, partly on the user's computer and partly on a remote computer or entirely on the remote computer or server. In the latter scenario, the remote computer may be connected to the user's computer through any type of network, including a local area network (LAN) or a wide area network (WAN), or the connection may be made to an external computer (for example, through the Internet using an Internet Service Provider).

[0351] These computer program instructions may also be stored in a computer readable medium that can direct a computer, other programmable data processing apparatus, or other devices to function in a particular manner, such that the instructions stored in the computer readable medium produce an article of manufacture including instructions which implement the function/act specified herein.

[0352] The computer program instructions may also be loaded onto a computer, other programmable data processing apparatus, or other devices to cause a series of operational steps to be performed on the computer, other programmable apparatus or other devices to produce a computer implemented process such that the instructions which execute on the computer or other programmable apparatus provide processes for implementing the functions/acts specified herein.

[0353] Unless defined otherwise all technical and scientific terms used herein have the same meaning as commonly understood to one of ordinary skill in the art to which this invention belongs.

[0354] The following examples and figures are provided for illustrative purposes. It is thus understood that the example and figures are not to be construed as limiting. The skilled person in the art will clearly be able to envisage further modifications of the principles laid out herein.

### EXAMPLES

### Example 1

### Gene Selection to Build a Prostate Cancer Prognostic Index (PCPI)

[0355] To select gene candidates to build the PCPI various molecular pathways (as outlined on http://csbi.ltdk.helsinkili/anduril/tcga-gbm/table4_2.html) were investigated for correlation of the putative prognostic gene marker PDE4D7 as described in WO2010131194 and WO2010131195. Those molecular pathways that showed significant correlation were selected for down-stream analysis (FIG. 1).

[0356] Furthermore, gene candidates related to metastatic and/or hormone-refractory prostate cancer were selected from the following literature
[0357] Gorlov IP et al. Candidate pathways and genes for prostate cancer: a meta-analysis of gene expression data; BMC Medical Genomics 2009, 2:48
[0358] Stanbrough M et al: Increased Expression of Genes Converting Adrenal Androgens to Testosterone in Androgen-Independent Prostate Cancer; Cancer Res 2006;66:2815-2825
[0359] Tamura K et al. Molecular Features of Hormone-Refractory Prostate Cancer Cells by Genome-Wide Gene Expression Profiles; Cancer Res 2007; 67(11):5117-25
[0360] Lapointe J et al. Gene expression profiling identifies clinically relevant subtypes of prostate cancer; PNAS 2003; 101(3):8110816
[0361] Sun Y et al. Optimizing Molecular Signatures for Predicting Prostate Cancer Recurrence. The Prostate, 69:1119-1127 (2009)

[0362] In total 967 genes (cf. FIG. 1) reported to be potentially relevant to prostate cancer progression were selected for further analysis.

[0363] To build a 19-gene prognostic signature, i.e. a set of marker genes of interest, the following data sets were used:
[0364] Taylor B S et al. Integrative Genomic Profiling of Human Prostate Cancer. Cancer Cell 18, 11-22, 2010 (GEO data set ID: GSE21032)
[0365] Boormans J L et al. Identification of TDRD1 as a direct target gene of ERG in primary prostate cancer. Int J Cancer 2013 Jul. 15; 133(2):335-45 (GEO data set ID: GSE41408)
[0366] Sun Y et al. Optimizing Molecular Signatures for Predicting Prostate Cancer Recurrence. The Prostate, 69:1119-1127 (2009) (GEO data set ID: GSE25136)
[0367] Sboner A et al. Molecular sampling of prostate cancer: a dilemma for predicting disease progression. BMC Medical Genomics 2010, 3:8 (GEO data set ID: GSE16560)
[0368] Nagakawa T et al. A Tissue Biomarker Panel Predicting Systemic Progression after PSA Recurrence Post-Definitive Prostate Cancer Therapy. PLoS ONE 3(5), e2318 (2010) (GEO data set ID: GSE10645)

[0369] To further test and validate the built Prostate Cancer Prognostic Index (PCPI) the following data set was used:

[0370] Erho N et al. Discovery and Validation of a Prostate Cancer Genomic Classifier that Predicts Early Metastasis Following Radical Prostatectomy. PLoS One 8(6), e66855 (2013) (GEO data set ID: GSE46691)

[0371] Processing of GSE Gene Expression Data

[0372] Respective CEL files were downloaded from GEO (Gene Expression Omnibus): http://www.ncbi.nlm.nih.gov/geo/. The CEL file data were uploaded into Expression Console (Affymetrix Inc; Build 1.3.1.187) and were pre-processed using the appropriate probe set annotation files provided by Affymetrix Inc. where appropriate, i.e., data sets run on an Affymetrix Inc platform: GSE21032, GSE41408, GSE25136. For data sets run on the DASL platform (i.e., GSE16560, GSE10645) the data series matrix files were used as provided by GEO for downstream data analysis.

[0373] Reference genes are supposed to have a stable expression independently of the sample being processed and therefore can be used as an internal standard to normalize the output Cq values of a PCR analysis so that the results are comparable independently of the amount of input sample used. Though such genes are supposed to be stable, there is always some variability in their expression, and this stability can also depend on the tissue being analyzed. For such reason it is recommended to use more than one reference gene in the normalization of PCR Cq values and to use a set of genes that presents low variability in the specific type of tissue/sample being analyzed (C. L. Andersen, J. L. Jensen, and T. F. Ørntoft, “Normalization of Real-Time Quantitative Reverse Transcription-PCR Data: A Model-Based Variance Estimation Approach to Identify Genes Suited for Normalization, Applied to Bladder and Colon Cancer Data Sets,” Cancer Res., vol. 64, no. 15, pp. 5245-5250, August 2004; J. Vandesompele, K. De Preter, F. Pattyn, B. Poppe, N. Van Roy, A. De Paepe, and F. Speleman, “Accurate normalization of real-time quantitative RT-PCR data by geometric averaging of multiple internal control genes,” Genome Biol., vol. 3, no. 7, p. RESEARCH0034, June 2002).

[0374] An initial selection of 9 reference genes to be used in this study was performed. Final selection of reference gene set used for normalization was done by running the with the Biogazelle Software tool (qBase+ with GeNorm analysis J. Hellemans, G. Mortier, A. D. Paepe, F. Speleman, and J. Vandesompele, “qBase relative quantification framework and software for management and automated analysis of real-time quantitative PCR data,” Genome Biol., vol. 8, no. 2, p. R19, February 2007.) on all the analyzed clinical samples.

[0375] The output Cq values of a PCR assay are intrinsically logarithmic (base 2) and inversely proportional to the amount of mRNA present in the sample. We use the following formula to normalize the raw Cq values:

N(Cq_{gene of interest})=Mean(Cq_{ref gene})−(Cq_{gene of interest})

[0376] Where N(Cq_{gene of interest}) is normalized gene expression value for selected genes of interest; where Mean(Cq_{ref}gene) is the arithmetic mean of the PCR Cq values of the selected combination of reference genes; where (Cq_{gene of interest}) is the PCR Cq value of the gene of interest.

[0377] In case other technologies than qRT-PCR are used to measure the expression of the reference genes or the genes of interest the PCR Cq value will be replaced by a normalized measurement of the respective technology (e.g., a RMA (Robust Multi-array Average) normalized gene expression value for DNA microarrays, or a FPKM (Fragements Per Kilobase of Exon Per Million Fragments Mapped) normalized gene expression value for RNA sequencing).

[0378] Calculation of Prostate Cancer Progression Index (PCPI)

[0379] Selected Genes of Interest (GOI) were grouped into those down-regulated between patient groups with and without progression after primary treatment compared to those up-regulated between patient groups with and without progression after primary treatment. An average gene expression value for the down-regulated genes was calculated (GEV_av_GOI_down) as well as an average gene expression value for the up-regulated genes (GEV_av_GOI_up) from the normalized gene expression data per each analyzed patient sample. The Prostate Cancer Progression Index PCPI per patient sample was determined as:

PCPI=(GEV_av_GOI_up)−(GEV_av_GOI_down)

[0380] The calculated PCPI was used for any further statistical data analysis.

[0381] PCPI_17 Computation (Based on Quantitative Real-Time PCR Data)

[0382] The PCPI was computed using the following formula:

PCPI=Mean(N(Cq_{PCPI genes up}))−Mean(N(Cq_{PCPI genes down}))

[0383] where

[0384] Mean(N(Cq_{PCPI genes up})) is the arithmetic mean of the normalized gene expression values (see above) for the genes: BGN, BIRC5, COL1A1, COL3A1, COL5A2, DYRK2, INHBA, THBS2, and VCAN

[0385] and where

[0386] Mean(N(Cq_{PCPI genes down})), is the arithmetic mean of the normalized gene expression values (see above) for the genes: AZGP1, FBLN1, ILK, KRT15, MEIS2, MYBPC1, PAGE4, and SRD5A2.

[0387] PCPI_18 Computation (Based on Quantitative Real-Time PCR Data)

[0388] The PCPI was computed using the following formula:

PCPI=Mean(N(Cq_{PCPI genes up}))−Mean(N(Cq_{PCPI genes down}))

[0389] where

[0390] Mean(N(Cq_{PCPI genes up})) is the arithmetic mean of the normalized gene expression values (see above) for the genes: BGN, BIRC5, COL1A1, COL3A1, COL5A2, DYRK2, INHBA, THBS2, and VCAN

[0391] and where

[0392] Mean(N(Cq_{PCPI genes down})), is the arithmetic mean of the normalized gene expression values (see above) for the genes: PDE4D, AZGP1, FBLN1, ILK, KRT15, MEIS2, MYBPC1, PAGE4, and SRD5A2

[0393] PCPI_19 Computation (Based on Quantitative Real-Time PCR Data)

[0394] The PCPI was computed using the following formula:

PCPI=Mean(N(Cq_{PCPI genes up}))−Mean(N(Cq_{PCPI genes down}))

[0395] where

[0396] Mean(N(Cq_{PCPI genes up})) is the arithmetic mean of the normalized gene expression values (see above) for the genes: BGN, BIRC5, COL1A1, COL3A1, COL5A2, DYRK2, INHBA, THBS2, and VCAN

[0397] and where

[0398] Mean(N(Cq_{PCPI genes down})), is the arithmetic mean of the normalized gene expression values (see above) for the genes: PDE4D5, PDE4D7, AZGP1, FBLN1, ILK, KRT15, MEIS2, MYBPC1, PAGE4, and SRD5A2.

[0399] Correlation Analysis of the Prostate Cancer Progression Index (PCPI) vs. Clinical Parameters to Patient Outcome

[0400] All statistical analysis (e.g., logistic regression analysis, ROC analysis, COX regression analysis, etc.) of the PCPI and its correlation to patient outcome in comparison to clinical parameters like PSA, pGleason, pT Stage was performed with XLSTAT Version 2014.1.03

[0401] Results

[0402] The 967 selected gene candidates were investigated for differential expression in the above gene expression data sets between prostate cancer patients that did not show progression of their disease after primary treatment vs. those patient groups that demonstrated disease progression to either of the following clinical endpoints: biochemical recurrence, clinical recurrence by detection of local or distant metastases, prostate cancer specific death.

[0403] Table 2 (cf. FIG. 2) provides an overview of 57 selected genes that were found to be significantly (p<0.05) differentially expressed and were regulated between patient groups in the same direction (i.e., either up- or down-regulated) between above mentioned patient groups at least in three out of the five tested data sets. Subsequently, genes were ranked into three categories according to the following criteria:

[0404] Rank_3: all genes that were observed in max 3 data sets to be differentially expressed with a significant p-value (p<0.05) in the same direction or genes with non-unique annotation

[0405] Rank_2: all genes that were observed in 4 or 5 data sets to be differentially expressed with a significant p-value (p<0.05) in the same direction

[0406] Rank_1: all genes that were observed in 4 or 5 data sets to be differentially expressed with a significant p-value (p<0.05) in the same direction but limited to 9 genes up-regulated as well as 10 genes down-regulated

[0407] A preferred PCPI signature comprises or consists of the following 19 genes: PDE4D5, PDE4D7, AZGP1, FBLN1, ILK, KRT15, MEIS2, MYBPC1, PAGE4, SRD5A2, COL1A1, COL3A1, COL5A2, INHBA, THBS2, VCAN, BGN, BIRC5, and DYRK2.

[0408] As not all data sets provide information on transcript level of PDE4D isoforms (i.e., PDE4D5 and PDE4D7) the demonstrated results are based on the measurement of the PDE4D gene as the expression of PDE4D is very well correlated to the expression of PDE4D7 (normalized to the expression of PDE4D5) in data sets GSE21032 and GSE41408); consequently, the determined PCPI_18 comprised the following 18 genes: PDE4D, AZGP1, FBLN1, ILK, KRT15, MEIS2, MYBPC1, PAGE4, SRD5A2, COL1A1, COL3A1, INHBA, THBS2, VCAN, BGN, BIRC5, DYRK2.

[0409] For such data sets where the PDE4D gene was not measured (i.e., GSE16560, GSE10645) the determined PCPI_17 comprised the following 17 genes: AZGP1, FBLN1, ILK, KRT15, MEIS2, MYBPC1, PAGE4, SRD5A2, COL1A1, COL3A1, INHBA, THBS2, VCAN, BGN, BIRC5, DYRK2.

[0410] Correlation of the PCPI to Clinical Outcome Data of Prostate Cancer Patients after Primary Treatment

[0411] Table 3 (cf. FIG. 3) shows an overview on the performance of PCPI_18 or PCPI_17 to predict the primary endpoint of development of distant metastases within 10-15 years after primary treatment (prostate surgery in general) for the data sets GSE21032, GSE41408, GSE25136, GSE16560, GSE10645. For patients investigated in data set GSE16560 the cancers of the prostate were detected during a TURP (transurethral resection) and patients were subsequently managed conservatively (i.e., without removal of the prostate). For patients investigated in data set GSE10645 the monitoring of patients for the endpoint did only start after biochemical recurrence). These data sets were used to build the PCPI signature (training data). The number of patients per group (no progression vs. progression to metastases) is shown as well as the AUC (Area Under the Curve) derived from a ROC analysis. The AUC indicates the relative power of the PCPI in the different data sets to predict the primary endpoint within the cohort).

[0412] Table 4 (cf. FIG. 4) shows the performance of PCPI_18 to predict the primary endpoint of development of distant metastases within 10-15 years after primary treatment for the data set GSE46691; this data set was not used to train the PCPI and is used as an independent verification data set (validation data). For patients investigated in data set GSE10645 the monitoring of patients for the endpoint did only start after biochemical recurrence). The number of patients per group (no progression vs. progression to metastases) is shown as well as the AUC (Area Under the Curve) derived from a ROC analysis. The AUC indicates the relative power of the PCPI in the different data sets to predict the primary endpoint within the cohort.

[0413] Table 5 (cf. FIG. 5) shows the performance of PCPI_18 or PCPI_17 to predict the primary endpoint of development of distant metastases within 10-15 years after primary treatment (prostate surgery in general) for the data sets GSE21032, GSE41408, GSE16560, GSE10645 in a multivariate COX regression analysis compared to standard clinical parameters like pre-treatment PSA, biopsy or pathology Gleason score, or clinical/pathology disease stage. The Chi Square as well as the Hazard Ratio for the PCPI and the individual clinical parameters is shown for each individual data set.

[0414] Table 6 (cf. FIG. 6) shows an overview on the performance of PCPI_18 to predict the primary endpoint of development of biochemical disease recurrence (BCR) within 10-15 years after primary treatment (prostate surgery in general) for the data sets GSE21032, GSE41408, GSE25136. The number of patients per group (no progression vs. progression to BCR) is shown as well as the AUC (Area Under the Curve) derived from a ROC analysis. The AUC indicates the relative power of the PCPI in the different data sets to predict the primary endpoint within the cohort).

[0415] Table 7 (cf. FIG. 7) shows the performance of PCPI_18 to predict the primary endpoint of development of biochemical disease recurrence (BCR) within 10-15 years after primary treatment (prostate surgery in general) for the data sets GSE21032, GSE41408, GSE25136 in a multivariate COX regression analysis compared to standard clinical parameters like pre-treatment PSA, biopsy or pathology Gleason score, or clinical/pathology disease stage. The Chi Square as well as the Hazard Ratio for the PCPI and the individual clinical parameters is shown for each individual data set.

[0416] Table 8 (cf. FIG. 8) shows a ROC curve cut-off analysis for PCPI_18 to support clinical decision making towards patient stratification for either active surveillance (AS) or active treatment (e.g., prostatectomy, radiotherapy, hormone therapy). The cut-off as shown in the table was selected from the ROC curve such that >=90% of men with aggressive disease were correctly classified (corresponding to 90% sensitivity). This cut-off allows the stratification of 134 with a very low-risk profile towards e.g. active surveillance instead of e.g. surgery. The progression-free survival in this cohort to the endpoint of metastatic disease over approx. 10 years follow-up is close to 85%. The same approach was applied to the clinical model (pathology Gleason score) with the result that a cut-off of a Gleason score <=6 would lead to the stratification of only 57 men towards e.g. active surveillance instead of e.g. surgery. The progression-free survival in this patient cohort would be close to 90% but on the cost that a lot more men with non-progressive disease would be stratified to e.g. surgery; the use of PCPI_18 stratifies more than twice as many men to AS compared to pathology Gleason score while the risk profile is very comparable (85% vs. 90% progression-free survival, respectively). The stratification power can be even further increased by a combination model of PCPI_18 and the pathology Gleason. Using that model 146 men (compared to 134) would be stratified to AS with a progression-free survival probability over 10 years of around 87%.

[0417] The cut-off analysis for the shown patient cohort was performed for the total cohort (545 patients), a sub-cohort with pathology Gleason scores>=7 (482 patients), as well as another sub-cohort with pathology Gleason scores>=8 (211 patients).

[0418] FIGS. 11, 12 and 13 refer to an analysis obtained from a study, which has been performed on approx. 500 patients with longitudinal follow up comparing the performance of the PCPI_19 (FIG. 11), the GPSu score, which is derived from RNAseq data analyzing the expression of 12 cancer related genes and 5 reference genes and was calculated following the method as far as it can be inferred from the article “Analytical validation of the Oncotype DX prostate cancer assay—a clinical RT-PCR assay optimized for prostate needle biopsies” by Dejan Knezevic et al. in BMC Genomics (2013), 14: 690 (FIG. 12) and the CCP score derived from the expression levels of 31 genes and calculated as far as can be inferred from the article “Prognostic value of an RNA expression signature derived from cell cycle proliferation genes for recurrence and death from prostate cancer: A retrospective study in two cohorts” by Jack Cuzick et al. in Lancet Oncol. (2011); 12(3): 245-255) (FIG. 13).

[0419] For better comparison, the GPSu and CCP score have been scaled to a range between 1 to 5.

[0420] The FIGS. 11, 12 and 13 show different recurrence risks (see below for description) over 5 or 10 years according to different patient groups. On the x-axis, patient groups have been defined by the NCCN risk groups; VL&LR=very low and low risk; FIR=favorable intermediate risk; UIR=unfavorable intermediate risk; HR=high risk. The NCCN are commonly used US guidelines in oncology (https://www.nccn.org/professionals/physician_gls/f_guidelines.asp). On the y-axis the patient groups have been defined by 4 categories of the different scores: score 1-2; 2-3; 3-4, and 4-5. In the 4×4 grid, patients have been selected for any of the cells of the grid according to their NCCN clinical risk characteristics and according to the score they have for PCPI, GPSu or CCP. The different risk according to clinical risk group was calculated (the line at the bottom) or according to score category (the column on the right hand side of the table).

[0421] Within the cells only the 5-year BCR recurrence risk is depicted for reasons of clarity.

[0422] The risk descriptions are:

[0423] 5-y BCR—biochemical recurrence over 5 years

[0424] 10-y CR—clinical recurrence to metastases over 10 years

[0425] 10-y PCSM—prostate cancer specific mortality over 10 years

[0426] 10-y OM—overall mortality (due to all reasons) over 10 years

[0427] The numbers underlined in FIGS. 11, 12 and 13 indicate areas of improved performance of PCPI over the other signatures. The patients that would fall into these categories are potential patients for active surveillance compared to active treatment clinical decisions and should therefore have preferably as little recurrence risk as possible. The PCPI outperforms the other signatures in these areas.

The application's sequence listing, which the Patent Office published only in electronic form, follows.

SEQUENCE LISTING (204 sequences)

SEQ ID NO: 1 - DNA, 7979 bp, Homo sapiens
cagcagcaggctcagacctgcttccctggacatttccgggaccgtgagcgagggaaccacgttgccctggattcttgccagctgtacaaagttgaccaggaaaatggctcagcagacaagcccggacactttaacagtacctgaagtggataatccgcattgtccaaacccgtggctgaacgaagaccttgtgaaatccttgcgagaaaacctgttgcagcatgagaagtccaagacagcgaggaaatcggtttctcccaagctctctccagtgatctctccgagaaattcccccaggcttctgcgcagaatgcttctcagcagcaacatccccaaacagcggcgtttcacggtggcacatacatgttttgatgtggacaatggcacatctgcgggacggagtcccttggatcccatgaccagcccaggatccgggctaattctccaagcaaattttgtccacagtcaacgacgggagtccttcctgtatcgatccgacagcgattatgacctctctccaaagtctatgtcccggaactcctccattgccagtgatatacacggagatgacttgattgtgactccatttgctcaggtcttggccagtctgcgaactgtacgaaacaactttgctgcattaactaatttgcaagatcgagcacctagcaaaagatcacccatgtgcaaccaaccatccatcaacaaagccaccataacagaggaggcctaccagaaactggccagcgagaccctggaggagctggactggtgtctggaccagctagagaccctacagaccaggcactccgtcagtgagatggcctccaacaagtttaaaaggatgcttaatcgggagctcacccatctctctgaaatgagtcggtctggaaatcaagtgtcagagtttatatcaaacacattcttagataagcaacatgaagtggaaattccttctccaactcagaaggaaaaggagaaaaagaaaagaccaatgtctcagatcagtggagtcaagaaattgatgcacagctctagtctgactaattcaagtatcccaaggtttggagttaaaactgaacaagaagatgtccttgccaaggaactagaagatgtgaacaaatggggtcttcatgttttcagaatagcagagttgtctggtaaccggcccttgactgttatcatgcacaccatttttcaggaacgggatttattaaaaacatttaaaattccagtagatactttaattacatatcttatgactctcgaagaccattaccatgctgatgtggcctatcacaacaatatccatgctgcagatgttgtccagtctactcatgtgctattatctacacctgctttggaggctgtgtttacagatttggagattcttgcagcaatttttgccagtgcaatacatgatgtagatcatcctggtgtgtccaatcaatttctgatcaatacaaactctgaacttgccttgatgtacaatgattcctcagtcttagagaaccatcatttggctgtgggctttaaattgcttcaggaagaaaactgtgacattttccagaatttgaccaaaaaacaaagacaatctttaaggaaaatggtcattgacatcgtacttgcaacagatatgtcaaaacacatgaatctactggctgatttgaagactatggttgaaactaagaaagtgacaagctctggagttcttcttcttgataattattccgataggattcaggttcttcagaatatggtgcactgtgcagatctgagcaacccaacaaagcctctccagctgtaccgccagtggacggaccggataatggaggagttcttccgccaaggagaccgagagagggaacgtggcatggagataagccccatgtgtgacaagcacaatgcttccgtggaaaaatcacaggtgggcttcatagactatattgttcatcccctctgggagacatgggcagacctcgtccaccctgacgcccaggatattttggacactttggaggacaatcgtgaatggtaccagagcacaatccctcagagcccctctcctgcacctgatgacccagaggagggccggcagggtcaaactgagaaattccagtttgaactaactttagaggaagatggtgagtcagacacggaaaaggacagtggcagtcaagtggaagaagacactagctgcagtgactccaagactctttgtactcaagactcagagtctactgaaattccccttgatgaacaggttgaagaggaggcagtaggggaagaagaggaaagccagcctgaagcctgtgtcatagatgatcgttctcctgacacgtaacagtgcaaaaactttcatgccttttttttttttaagtagaaaaattgtttccaaagtgcatgtcacatgccacaaccacggtcacacctcactgtcatctgccaggacgtttgttgaacaaaactgaccttgactactcagtccagcgctcaggaatatcgtaaccagttttttcacctccatgtcatccgagcaaggtggacatcttcacgaacagcgtttttaacaagatttcagcttggtagagctgacaaagcagataaaatctactccaaattattttcaagagagtgtgactcatcaggcagcccaaaagtttattggacttggggtttctattcctttttatttgtttgcaatattttcagaagaaaggcattgcacagagtgaacttaatggacgaagcaacaaatatgtcaagaacaggacatagcacgaatctgttaccagtaggaggaggatgagccacagaaattgcataattttctaatttcaagtcttcctgatacatgactgaatagtgtggttcagtgagctgcactgacctctacattttgtatgatatgtaaaacagattttttgtagagcttacttttattattaaatgtattgaggtattatatttaaaaaaaactatgttcagaacttcatctgccactggttatttttttctaaggagtaacttgcaagttttcagtacaaatctgtgctacactggataaaaatctaatttatgaattttacttgcaccttatagttcatagcaattaactgatttgtagtgattcattgtttgttttatataccaatgacttccatattttaaaagagaaaaacaactttatgttgcaggaaaccctttttgtaagtctttattatttactttgcattttgtttcactctttccagataagcagagttgctcttcaccagtgtttttcttcatgtgcaaagtgactatttgttctataatacttttatgtgtgttatatcaaatgtgtcttaagcttcatgcaaactcagtcatcagttcgtgttgtctgaagcaagtgggagatatataaatacccagtagctaaaatggtcagtcttttttagatgttttcctacttagtatctcctaataacgttttgctgtgtcactagatgttcatttcacaagtgcatgtctttctaataatccacacatttcatgctctaataatccacacatttcatgctcatttttattgtttttacagccagttatagtaagaaaaaggtttttccccttgtgctgctttataatttagcgtgtgtctgaaccttatccatgtttgctagatgaggtcttgtcaaatatatcactaccattgtcaccggtgaaaagaaacaggtagttaagttagggttaacattcatttcaaccacgaggttgtatatcatgactagcttttactcttggtttacagagaaaagttaaacagccaactaggcagtttttaagaatattaacaatatattaacaaacaccaatacaactaatcctatttggttttaatgatttcaccatgggattaagaactatatcaggaacatccctgagaaacggttttaagtgtagcaactactcttccttaatggacagccacataacgtgtaggaagtcctttatcacttatcctcgatccataagcatatcttgcagaggggaactacttctttaaacacatggagggaaagaagatgatgccactggcaccagagggttagtactgtgatgcatcctaaaatatttattatattggtaaaaattctggttaaataaaaaattagagatcactcttggctgatttcagcaccaggaactgtattacagttttagagattaattcctagtgtttacctgattatagcagttggcatcatggggcatttaattctgactttatccccacgtcagccttaataaagtcttctttaccttctctatgaagactttaaagcccaaataatcatttttcacattgatattcaagaattgagatagatagaagccaaagtgggtatctgacaagtggaaaatcaaacgtttaagaagaattacaactctgaaaagcatttatatgtggaacttctcaaggagcctcctggggactggaaagtaagtcatcagccaggcaaatgactcatgctgaagagagtccccatttcagtcccctgagatctagctgatgcttagatcctttgaaataaaaattatgtctttataactctgatcttttacataaagcagaagaggaatcaactagttaattgcaaggtttctactctgtttcctctgtaaagatcagatggtaatctttcaaataagaaaaaaataaagacgtatgtttgaccaagtagtttcacaagaatatttgggaacttgtttcttttaattttatttgtccctgagtgaagtctagaaagaaaggtaaagagtctagagtttattcctctttccaaaacattctcattcctctcctccctacacttagtatttcccccacagagtgcctagaatcttaataatgaataaaataaaaagcagcaatatgtcattaacaaatccagacctgaaagggtaaagggtttataactgcactaataaagagaggctctttttttttcttccagtttgttggtttttaatggtaccgtgttgtaaagatacccactaatggacaatcaaattgcagaaaaggctcaatatccaagagacagggactaatgcactgtacaatctgcttatccttgcccttctctcttgccaaagtgtgcttcagaaatatatactgctttaaaaaagaataaaagaatatccttttacaagtggctttacatttcctaaaatgccataagaaaatgcaatatctgggtactgtatggggaaaaaaatgtccaagtttgtgtaaaaccagtgcatttcagcttgcaagttactgaacacaataatgctgttttaattttgttttatatcagttaaaattcacaataatgtagatagaacaaattacagacaaggaaagaaaaaacttgaatgaaatggattttacagaaagctttatgataatttttgaatgcattatttattttttgtgccatgcattttttttctcaccaaatgaccttacctgtaatacagtcttgtttgtctgtttacaaccatgtatttattgcaatgtacatactgtaatgttaattgtaaattatctgttcttattaaaacatcatcccatgatgggatggtgttgatatatttggaaactcttggtgagagaatgaatggtgtgtatacatactctgtacatttttcttttctcctgtaatatagtcttgtcaccttagagcttgtttatggaagattcaagaaaactataaaatacttaaagatatataaatttaaaaaaacatagctgcaggtctttggtcccagggctgtgccttaactttaaccaatattttcttctgttttgctgcatttgaaaggtaacagtggagctagggctgggcattttacatccaggcttttaattgattagaattctgccaataggtggattttacaaaaccacagacaacctctgaaagattctgagacccttttgagacagaagctcttaagtacttcttgccagggagcagcactgcatgtgtgatggttgtttgccatctgttgatcaggaactacttcagctacttgcatttgattatttcctttttttttttttttaactcggaaacacaactggggaaatatattctttcccagtgattataaacaatctttttcttttttttaagtccttttggcttctagagctcataggaaaatggacttgatttgaaattggagccagagtttactcgtgttggttatctattcatcagcttcctgacatgttaagagaatacattaaagagaaaatactgttttttaatcctaaaatttttcttccactaagataaaccaaatgtccttacatatatgtaaacccatctatttaaacgcaaaggtgggttgatgtcagtttacatagcagaaagcattcactatcctctaagatttgtttctgcaaaactttcattgctttagaattttaaaatttcaccttgtacaatggccagcccctaaagcaggaaacatttataatggattatatggaaacatcctcccagtacttgcccagcccttgaatcatgtggcttttcagtgaaaggaaagattctttttctaggaaaaatgagcctattttattttattttattttattttttgacacaaactgtagattttagcagccctggcccaaaggaatttgattacttttgttttaaacagtacaaaggggacactataattacaaaaacatccttaactgatttgagttgtttttatttctttggatatattttcagagtggtaaattgtgtgtgagaattacaaatgattattcttttagtggtttcttagcctctcttacagcccacggggatagtactgtacatcaataccttcatatgaaatttttatatgcaatgaaaataaaagcatgggttgattctgcctatttatgactcaatcttttacaaataaaagattattcattttaaattatagttcaatcagcatgtctcttaggatactgaacgtggttgaaatgaaaggatagtgacatcataagttagtactgatattcataaccaaataaagccaacttgagtaattttgctacattaaaaattaccaaaattacttagatggcctataagattaagcatggtgttttctaagcaagctttgaaaggggccttccatacttacttaattgaatattctgggatattgaaaattattcagatacttgacaattatttttggttacctactccgcaaactacaaagttttaaggactcaacaataagttaatgagacacagtgtttgctttcatggagcttacagtctggaggggacaaaggcttaaacaatactcatataattatatatgtgatcagtacaatgaaggagctcagtggggtaaataagcaggaacctgaacttgatctgttccggagggccacagaaggcttccttgaggccttgagaaagtgatttgcatctgagttctgaaggattgtaagaggtaactagggaaaaagttgacaggaagaggaaggggatccagacaagaaacatttgcaaagatcttgaggcataaatgagcttgagacatctggagaaactgaggaaaagtgagagagtaggcagggcctggagccgcagagccattgctaaccatcctgtgtgagatatcccccattctgtagctttattctcataaccctgctcaattttctttataacacttctcacagatttatatacgtgtttgtttttgttatctgtctctcccaccagaccacagctccatgagagcaaggtctttgcttaccaatatatcactagcacttaaaactatgcctggtacacagtaggttcttaatatgtgttgaatatagccatcaaattgatattggatataattcaatctgataagatattttgagatattaaagagtttttaacttgataccataaaaaaaaaaaaaaaaa

SEQ ID NO: 2 - protein, 745 aa, Homo sapiens
MAQQTSPDTLTVPEVDNPHCPNPWLNEDLVKSLRENLLQHEKSKTARKSVSPKLSPVISPRNSPRLLRRMLLSSNIPKQRRFTVAHTCFDVDNGTSAGRSPLDPMTSPGSGLILQANFVHSQRRESFLYRSDSDYDLSPKSMSRNSSIASDIHGDDLIVTPFAQVLASLRTVRNNFAALTNLQDRAPSKRSPMCNQPSINKATITEEAYQKLASETLEELDWCLDQLETLQTRHSVSEMASNKFKRMLNRELTHLSEMSRSGNQVSEFISNTFLDKQHEVEIPSPTQKEKEKKKRPMSQISGVKKLMHSSSLTNSSIPRFGVKTEQEDVLAKELEDVNKWGLHVFRIAELSGNRPLTVIMHTIFQERDLLKTFKIPVDTLITYLMTLEDHYHADVAYHNNIHAADVVQSTHVLLSTPALEAVFTDLEILAAIFASAIHDVDHPGVSNQFLINTNSELALMYNDSSVLENHHLAVGFKLLQEENCDIFQNLTKKQRQSLRKMVIDIVLATDMSKHMNLLADLKTMVETKKVTSSGVLLLDNYSDRIQVLQNMVHCADLSNPTKPLQLYRQWTDRIMEEFFRQGDRERERGMEISPMCDKHNASVEKSQVGFIDYIVHPLWETWADLVHPDAQDILDTLEDNREWYQSTIPQSPSPAPDDPEEGRQGQTEKFQFELTLEEDGESDTEKDSGSQVEEDTSCSDSKTLCTQDSESTEIPLDEQVEEEAVGEEEESQPEACVIDDRSPDT

SEQ ID NO: 3 - DNA, 19 bp, Artificial Sequence
  PDE4D5_forward primer
gcttctcagcagcaacatc

SEQ ID NO: 4 - DNA, 20 bp, Artificial Sequence
  PDE4D5_reverse primer
tgccattgtccacatcaaaa

SEQ ID NO: 5 - DNA, 24 bp, Artificial Sequence
  PDE4D5 probe
acagcggcgtttcacggtggcaca

SEQ ID NO: 6 - DNA, 8130 bp, Homo sapiens
agattatagcccagcgtacgagaagcacgagtcctatagttggcgtaccctgaggcctgccagttcctgccttaatgcatatgtagtcgtaattgagttctgacacggccttggatgtttctgtcctaaatagctgacattgcatcttcaagactgtcattccagttggcttttgagtggatacgtgcagtgagatcattgacactggaaacactagttcccattttaattacttaaaacaccacgatgaaaagaaatacctgtgatttgctttctcggagcaaaagtgcctctgaggaaacactacattccagtaatgaagaggaagaccctttccgcggaatggaaccctatcttgtccggagactttcatgtcgcaatattcagcttccccctctcgccttcagacagttggaacaagctgacttgaaaagtgaatcagagaacattcaacgaccaaccagcctccccctgaagattctgccgctgattgctatcacttctgcagaatccagtggttttgatgtggacaatggcacatctgcgggacggagtcccttggatcccatgaccagcccaggatccgggctaattctccaagcaaattttgtccacagtcaacgacgggagtccttcctgtatcgatccgacagcgattatgacctctctccaaagtctatgtcccggaactcctccattgccagtgatatacacggagatgacttgattgtgactccatttgctcaggtcttggccagtctgcgaactgtacgaaacaactttgctgcattaactaatttgcaagatcgagcacctagcaaaagatcacccatgtgcaaccaaccatccatcaacaaagccaccataacagaggaggcctaccagaaactggccagcgagaccctggaggagctggactggtgtctggaccagctagagaccctacagaccaggcactccgtcagtgagatggcctccaacaagtttaaaaggatgcttaatcgggagctcacccatctctctgaaatgagtcggtctggaaatcaagtgtcagagtttatatcaaacacattcttagataagcaacatgaagtggaaattccttctccaactcagaaggaaaaggagaaaaagaaaagaccaatgtctcagatcagtggagtcaagaaattgatgcacagctctagtctgactaattcaagtatcccaaggtttggagttaaaactgaacaagaagatgtccttgccaaggaactagaagatgtgaacaaatggggtcttcatgttttcagaatagcagagttgtctggtaaccggcccttgactgttatcatgcacaccatttttcaggaacgggatttattaaaaacatttaaaattccagtagatactttaattacatatcttatgactctcgaagaccattaccatgctgatgtggcctatcacaacaatatccatgctgcagatgttgtccagtctactcatgtgctattatctacacctgctttggaggctgtgtttacagatttggagattcttgcagcaatttttgccagtgcaatacatgatgtagatcatcctggtgtgtccaatcaatttctgatcaatacaaactctgaacttgccttgatgtacaatgattcctcagtcttagagaaccatcatttggctgtgggctttaaattgcttcaggaagaaaactgtgacattttccagaatttgaccaaaaaacaaagacaatctttaaggaaaatggtcattgacatcgtacttgcaacagatatgtcaaaacacatgaatctactggctgatttgaagactatggttgaaactaagaaagtgacaagctctggagttcttcttcttgataattattccgataggattcaggttcttcagaatatggtgcactgtgcagatctgagcaacccaacaaagcctctccagctgtaccgccagtggacggaccggataatggaggagttcttccgccaaggagaccgagagagggaacgtggcatggagataagccccatgtgtgacaagcacaatgcttccgtggaaaaatcacaggtgggcttcatagactatattgttcatcccctctgggagacatgggcagacctcgtccaccctgacgcccaggatattttggacactttggaggacaatcgtgaatggtaccagagcacaatccctcagagcccctctcctgcacctgatgacccagaggagggccggcagggtcaaactgagaaattccagtttgaactaactttagaggaagatggtgagtcagacacggaaaaggacagtggcagtcaagtggaagaagacactagctgcagtgactccaagactctttgtactcaagactcagagtctactgaaattccccttgatgaacaggttgaagaggaggcagtaggggaagaagaggaaagccagcctgaagcctgtgtcatagatgatcgttctcctgacacgtaacagtgcaaaaactttcatgccttttttttttttaagtagaaaaattgtttccaaagtgcatgtcacatgccacaaccacggtcacacctcactgtcatctgccaggacgtttgttgaacaaaactgaccttgactactcagtccagcgctcaggaatatcgtaaccagttttttcacctccatgtcatccgagcaaggtggacatcttcacgaacagcgtttttaacaagatttcagcttggtagagctgacaaagcagataaaatctactccaaattattttcaagagagtgtgactcatcaggcagcccaaaagtttattggacttggggtttctattcctttttatttgtttgcaatattttcagaagaaaggcattgcacagagtgaacttaatggacgaagcaacaaatatgtcaagaacaggacatagcacgaatctgttaccagtaggaggaggatgagccacagaaattgcataattttctaatttcaagtcttcctgatacatgactgaatagtgtggttcagtgagctgcactgacctctacattttgtatgatatgtaaaacagattttttgtagagcttacttttattattaaatgtattgaggtattatatttaaaaaaaactatgttcagaacttcatctgccactggttatttttttctaaggagtaacttgcaagttttcagtacaaatctgtgctacactggataaaaatctaatttatgaattttacttgcaccttatagttcatagcaattaactgatttgtagtgattcattgtttgttttatataccaatgacttccatattttaaaagagaaaaacaactttatgttgcaggaaaccctttttgtaagtctttattatttactttgcattttgtttcactctttccagataagcagagttgctcttcaccagtgtttttcttcatgtgcaaagtgactatttgttctataatacttttatgtgtgttatatcaaatgtgtcttaagcttcatgcaaactcagtcatcagttcgtgttgtctgaagcaagtgggagatatataaatacccagtagctaaaatggtcagtcttttttagatgttttcctacttagtatctcctaataacgttttgctgtgtcactagatgttcatttcacaagtgcatgtctttctaataatccacacatttcatgctctaataatccacacatttcatgctcatttttattgtttttacagccagttatagtaagaaaaaggtttttccccttgtgctgctttataatttagcgtgtgtctgaaccttatccatgtttgctagatgaggtcttgtcaaatatatcactaccattgtcaccggtgaaaagaaacaggtagttaagttagggttaacattcatttcaaccacgaggttgtatatcatgactagcttttactcttggtttacagagaaaagttaaacagccaactaggcagtttttaagaatattaacaatatattaacaaacaccaatacaactaatcctatttggttttaatgatttcaccatgggattaagaactatatcaggaacatccctgagaaacggttttaagtgtagcaactactcttccttaatggacagccacataacgtgtaggaagtcctttatcacttatcctcgatccataagcatatcttgcagaggggaactacttctttaaacacatggagggaaagaagatgatgccactggcaccagagggttagtactgtgatgcatcctaaaatatttattatattggtaaaaattctggttaaataaaaaattagagatcactcttggctgatttcagcaccaggaactgtattacagttttagagattaattcctagtgtttacctgattatagcagttggcatcatggggcatttaattctgactttatccccacgtcagccttaataaagtcttctttaccttctctatgaagactttaaagcccaaataatcatttttcacattgatattcaagaattgagatagatagaagccaaagtgggtatctgacaagtggaaaatcaaacgtttaagaagaattacaactctgaaaagcatttatatgtggaacttctcaaggagcctcctggggactggaaagtaagtcatcagccaggcaaatgactcatgctgaagagagtccccatttcagtcccctgagatctagctgatgcttagatcctttgaaataaaaattatgtctttataactctgatcttttacataaagcagaagaggaatcaactagttaattgcaaggtttctactctgtttcctctgtaaagatcagatggtaatctttcaaataagaaaaaaataaagacgtatgtttgaccaagtagtttcacaagaatatttgggaacttgtttcttttaattttatttgtccctgagtgaagtctagaaagaaaggtaaagagtctagagtttattcctctttccaaaacattctcattcctctcctccctacacttagtatttcccccacagagtgcctagaatcttaataatgaataaaataaaaagcagcaatatgtcattaacaaatccagacctgaaagggtaaagggtttataactgcactaataaagagaggctctttttttttcttccagtttgttggtttttaatggtaccgtgttgtaaagatacccactaatggacaatcaaattgcagaaaaggctcaatatccaagagacagggactaatgcactgtacaatctgcttatccttgcccttctctcttgccaaagtgtgcttcagaaatatatactgctttaaaaaagaataaaagaatatccttttacaagtggctttacatttcctaaaatgccataagaaaatgcaatatctgggtactgtatggggaaaaaaatgtccaagtttgtgtaaaaccagtgcatttcagcttgcaagttactgaacacaataatgctgttttaattttgttttatatcagttaaaattcacaataatgtagatagaacaaattacagacaaggaaagaaaaaacttgaatgaaatggattttacagaaagctttatgataatttttgaatgcattatttattttttgtgccatgcattttttttctcaccaaatgaccttacctgtaatacagtcttgtttgtctgtttacaaccatgtatttattgcaatgtacatactgtaatgttaattgtaaattatctgttcttattaaaacatcatcccatgatgggatggtgttgatatatttggaaactcttggtgagagaatgaatggtgtgtatacatactctgtacatttttcttttctcctgtaatatagtcttgtcaccttagagcttgtttatggaagattcaagaaaactataaaatacttaaagatatataaatttaaaaaaacatagctgcaggtctttggtcccagggctgtgccttaactttaaccaatattttcttctgttttgctgcatttgaaaggtaacagtggagctagggctgggcattttacatccaggcttttaattgattagaattctgccaataggtggattttacaaaaccacagacaacctctgaaagattctgagacccttttgagacagaagctcttaagtacttcttgccagggagcagcactgcatgtgtgatggttgtttgccatctgttgatcaggaactacttcagctacttgcatttgattatttcctttttttttttttttaactcggaaacacaactggggaaatatattctttcccagtgattataaacaatctttttcttttttttaagtccttttggcttctagagctcataggaaaatggacttgatttgaaattggagccagagtttactcgtgttggttatctattcatcagcttcctgacatgttaagagaatacattaaagagaaaatactgttttttaatcctaaaatttttcttccactaagataaaccaaatgtccttacatatatgtaaacccatctatttaaacgcaaaggtgggttgatgtcagtttacatagcagaaagcattcactatcctctaagatttgtttctgcaaaactttcattgctttagaattttaaaatttcaccttgtacaatggccagcccctaaagcaggaaacatttataatggattatatggaaacatcctcccagtacttgcccagcccttgaatcatgtggcttttcagtgaaaggaaagattctttttctaggaaaaatgagcctattttattttattttattttattttttgacacaaactgtagattttagcagccctggcccaaaggaatttgattacttttgttttaaacagtacaaaggggacactataattacaaaaacatccttaactgatttgagttgtttttatttctttggatatattttcagagtggtaaattgtgtgtgagaattacaaatgattattcttttagtggtttcttagcctctcttacagcccacggggatagtactgtacatcaataccttcatatgaaatttttatatgcaatgaaaataaaagcatgggttgattctgcctatttatgactcaatcttttacaaataaaagattattcattttaaattatagttcaatcagcatgtctcttaggatactgaacgtggttgaaatgaaaggatagtgacatcataagttagtactgatattcataaccaaataaagccaacttgagtaattttgctacattaaaaattaccaaaattacttagatggcctataagattaagcatggtgttttctaagcaagctttgaaaggggccttccatacttacttaattgaatattctgggatattgaaaattattcagatacttgacaattatttttggttacctactccgcaaactacaaagttttaaggactcaacaataagttaatgagacacagtgtttgctttcatggagcttacagtctggaggggacaaaggcttaaacaatactcatataattatatatgtgatcagtacaatgaaggagctcagtggggtaaataagcaggaacctgaacttgatctgttccggagggccacagaaggcttccttgaggccttgagaaagtgatttgcatctgagttctgaaggattgtaagaggtaactagggaaaaagttgacaggaagaggaaggggatccagacaagaaacatttgcaaagatcttgaggcataaatgagcttgagacatctggagaaactgaggaaaagtgagagagtaggcagggcctggagccgcagagccattgctaaccatcctgtgtgagatatcccccattctgtagctttattctcataaccctgctcaattttctttataacacttctcacagatttatatacgtgtttgtttttgttatctgtctctcccaccagaccacagctccatgagagcaaggtctttgcttaccaatatatcactagcacttaaaactatgcctggtacacagtaggttcttaatatgtgttgaatatagccatcaaattgatattggatataattcaatctgataagatattttgagatattaaagagtttttaacttgataccataaaaaaaaaaaaaaaa

SEQ ID NO: 7 - protein, 748 aa, Homo sapiens
MKRNTCDLLSRSKSASEETLHSSNEEEDPFRGMEPYLVRRLSCRNIQLPPLAFRQLEQADLKSESENIQRPTSLPLKILPLIAITSAESSGFDVDNGTSAGRSPLDPMTSPGSGLILQANFVHSQRRESFLYRSDSDYDLSPKSMSRNSSIASDIHGDDLIVTPFAQVLASLRTVRNNFAALTNLQDRAPSKRSPMCNQPSINKATITEEAYQKLASETLEELDWCLDQLETLQTRHSVSEMASNKFKRMLNRELTHLSEMSRSGNQVSEFISNTFLDKQHEVEIPSPTQKEKEKKKRPMSQISGVKKLMHSSSLTNSSIPRFGVKTEQEDVLAKELEDVNKWGLHVFRIAELSGNRPLTVIMHTIFQERDLLKTFKIPVDTLITYLMTLEDHYHADVAYHNNIHAADVVQSTHVLLSTPALEAVFTDLEILAAIFASAIHDVDHPGVSNQFLINTNSELALMYNDSSVLENHHLAVGFKLLQEENCDIFQNLTKKQRQSLRKMVIDIVLATDMSKHMNLLADLKTMVETKKVTSSGVLLLDNYSDRIQVLQNMVHCADLSNPTKPLQLYRQWTDRIMEEFFRQGDRERERGMEISPMCDKHNASVEKSQVGFIDYIVHPLWETWADLVHPDAQDILDTLEDNREWYQSTIPQSPSPAPDDPEEGRQGQTEKFQFELTLEEDGESDTEKDSGSQVEEDTSCSDSKTLCTQDSESTEIPLDEQVEEEAVGEEEESQPEACVIDDRSPDT

SEQ ID NO: 8 - DNA, 20 bp, Artificial Sequence
  PDE4D7
gaacattcaacgaccaacca

SEQ ID NO: 9 - DNA, 20 bp, Artificial Sequence
  PDE4D7_reverse primer
tgccattgtccacatcaaaa

SEQ ID NO: 10 - DNA, 27 bp, Artificial Sequence
  PDE4D7 probe
ctgccgctgattgctatcacttctgca

SEQ ID NO: 11 - DNA, 1278 bp, Homo sapiens
ccattggcctgtagattcacctcccctgggcagggccccaggacccaggataatatctgtgcctcctgcccagaaccctccaagcagacacaatggtaagaatggtgcctgtcctgctgtctctgctgctgcttctgggtcctgctgtcccccaggagaaccaagatggtcgttactctctgacctatatctacactgggctgtccaagcatgttgaagacgtccccgcgtttcaggcccttggctcactcaatgacctccagttctttagatacaacagtaaagacaggaagtctcagcccatgggactctggagacaggtggaaggaatggaggattggaagcaggacagccaacttcagaaggccagggaggacatctttatggagaccctgaaagacatcgtggagtattacaacgacagtaacgggtctcacgtattgcagggaaggtttggttgtgagatcgagaataacagaagcagcggagcattctggaaatattactatgatggaaaggactacattgaattcaacaaagaaatcccagcctgggtccccttcgacccagcagcccagataaccaagcagaagtgggaggcagaaccagtctacgtgcagcgggccaaggcttacctggaggaggagtgccctgcgactctgcggaaatacctgaaatacagcaaaaatatcctggaccggcaagatcctccctctgtggtggtcaccagccaccaggccccaggagaaaagaagaaactgaagtgcctggcctacgacttctacccagggaaaattgatgtgcactggactcgggccggcgaggtgcaggagcctgagttacggggagatgttcttcacaatggaaatggcacttaccagtcctgggtggtggtggcagtgcccccgcaggacacagccccctactcctgccacgtgcagcacagcagcctggcccagcccctcgtggtgccctgggaggccagctaggaagcaagggttggaggcaatgtgggatctcagacccagtagctgcccttcctgcctgatgtgggagctgaaccacagaaatcacagtcaatggatccacaaggcctgaggagcagtgtggggggacagacaggaggtggatttggagaccgaagactgggatgcctgtcttgagtagacttggacccaaaaaatcatctcaccttgagcccacccccaccccattgtctaatctgtagaagctaataaataatcatccctccttgcctagcataaaaaaaaaaaaaaa

SEQ ID NO: 12 - protein, 298 aa, Homo sapiens
MVRMVPVLLSLLLLLGPAVPQENQDGRYSLTYIYTGLSKHVEDVPAFQALGSLNDLQFFRYNSKDRKSQPMGLWRQVEGMEDWKQDSQLQKAREDIFMETLKDIVEYYNDSNGSHVLQGRFGCEIENNRSSGAFWKYYYDGKDYIEFNKEIPAWVPFDPAAQITKQKWEAEPVYVQRAKAYLEEECPATLRKYLKYSKNILDRQDPPSVVVTSHQAPGEKKKLKCLAYDFYPGKIDVHWTRAGEVQEPELRGDVLHNGNGTYQSWVVVAVPPQDTAPYSCHVQHSSLAQPLVVPWEAS

SEQ ID NO: 13 - DNA, 20 bp, Artificial Sequence
  AZGP1_forward primer
tggagaccctgaaagacatc

SEQ ID NO: 14 - DNA, 20 bp, Artificial Sequence
  AZGP1_reverse primer
ctcgatctcacaaccaaacc

SEQ ID NO: 15 - DNA, 23 bp, Artificial Sequence
  AZGP1 probe
acgggtctcacgtattgcaggga

SEQ ID NO: 16 - DNA, 2312 bp, Homo sapiens
ctcctcccgggcgggataattgaacggcgcggccctggcccagcgttggctgccgaggctcggccggagcgtggagcccgcgccgctgccccaggaccgcgcccgcgcctttgtccgccgccgcccaccgcccgtcgcccgccgcccatggagcgcgccgcgccgtcgcgccgggtcccgcttccgctgctgctgctcggcggccttgcgctgctggcggccggagtggacgcggatgtcctcctggaggcctgctgtgcggacggacaccggatggccactcatcagaaggactgctcgctgccatatgctacggaatccaaagaatgcaggatggtgcaggagcagtgctgccacagccagctggaggagctgcactgtgccacgggcatcagcctggccaacgagcaggaccgctgtgccacgccccacggtgacaacgccagcctggaggccacatttgtgaagaggtgctgccattgctgtctgctggggagggcggcccaggcccagggccagagctgcgagtacagcctcatggttggctaccagtgtggacaggtcttccgggcatgctgtgtcaagagccaggagaccggagatttggatgtcgggggcctccaagaaacggataagatcattgaggttgaggaggaacaagaggacccatatctgaatgaccgctgccgaggaggcgggccctgcaagcagcagtgccgagacacgggtgacgaggtggtctgctcctgcttcgtgggctaccagctgctgtctgatggtgtctcctgtgaagatgtcaatgaatgcatcacgggcagccacagctgccggcttggagaatcctgcatcaacacagtgggctctttccgctgccagcgggacagcagctgcgggactggctatgagctcacagaggacaatagctgcaaagatattgacgagtgtgagagtggtattcataactgcctccccgattttatctgtcagaatactctgggatccttccgctgccgacccaagctacagtgcaagagtggctttatacaagatgctctaggcaactgtattgatatcaatgagtgtttgagtatcagtgccccgtgccctatcgggcatacatgcatcaacacagagggctcctacacgtgccagaagaacgtgcccaactgtggccgtggctaccatctcaacgaggagggaacgcgctgtgttgatgtggacgagtgcgcgccacctgctgagccctgtgggaagggacatcgctgcgtgaactctcccggcagtttccgctgcgaatgcaagacgggttactattttgacggcatcagcaggatgtgtgtcgatgtcaacgagtgccagcgctaccccgggcgcctgtgtggccacaagtgcgagaacacgctgggctcctacctctgcagctgttccgtgggcttccggctctctgtggatggcaggtcatgtgaagacatcaatgagtgcagcagcagcccctgtagccaggagtgtgccaacgtctacggctcctaccagtgttactgccggcgaggctaccagctcagcgatgtggatggagtcacctgtgaagacatcgacgagtgcgccctgcccaccgggggccacatctgctcctaccgctgcatcaacatccctggaagcttccagtgcagctgcccctcgtctggctacaggctggcccccaatggccgcaactgccaagacattgatgagtgtgtgactggcatccacaactgctccatcaacgagacctgcttcaacatccagggcggcttccgctgcctggccttcgagtgccctgagaactaccgccgctccgcagccacccgctgtgagcgcttgccttgccatgagaatcgggagtgctccaagctgcctctgagaataacctactaccacctctctttccccaccaacatccaagcgcccgcggtggttttccgcatgggcccctccagtgctgtccccggggacagcatgcagctggccatcaccggcggcaatgaggagggctttttcaccacccggaaggtgagcccccacagtggggtggtggccctcaccaagcctgtccccgagcccagggacttgctcctgaccgtcaagatggatctctctcgccacggcaccgtcagctcctttgtggccaagcttttcatctttgtgtctgcagagctctgagcactcgcttcgcgtcgcggggtctccctcctgttgctttcctaaccctgccctccggggcgttaataaagtcttagcaagcgtcccacacagtgaaaaaaaaaaaaaaaaaa

SEQ ID NO: 17 - DNA, 2662 bp, Homo sapiens
ctcctcccgggcgggataattgaacggcgcggccctggcccagcgttggctgccgaggctcggccggagcgtggagcccgcgccgctgccccaggaccgcgcccgcgcctttgtccgccgccgcccaccgcccgtcgcccgccgcccatggagcgcgccgcgccgtcgcgccgggtcccgcttccgctgctgctgctcggcggccttgcgctgctggcggccggagtggacgcggatgtcctcctggaggcctgctgtgcggacggacaccggatggccactcatcagaaggactgctcgctgccatatgctacggaatccaaagaatgcaggatggtgcaggagcagtgctgccacagccagctggaggagctgcactgtgccacgggcatcagcctggccaacgagcaggaccgctgtgccacgccccacggtgacaacgccagcctggaggccacatttgtgaagaggtgctgccattgctgtctgctggggagggcggcccaggcccagggccagagctgcgagtacagcctcatggttggctaccagtgtggacaggtcttccgggcatgctgtgtcaagagccaggagaccggagatttggatgtcgggggcctccaagaaacggataagatcattgaggttgaggaggaacaagaggacccatatctgaatgaccgctgccgaggaggcgggccctgcaagcagcagtgccgagacacgggtgacgaggtggtctgctcctgcttcgtgggctaccagctgctgtctgatggtgtctcctgtgaagatgtcaatgaatgcatcacgggcagccacagctgccggcttggagaatcctgcatcaacacagtgggctctttccgctgccagcgggacagcagctgcgggactggctatgagctcacagaggacaatagctgcaaagatattgacgagtgtgagagtggtattcataactgcctccccgattttatctgtcagaatactctgggatccttccgctgccgacccaagctacagtgcaagagtggctttatacaagatgctctaggcaactgtattgatatcaatgagtgtttgagtatcagtgccccgtgccctatcgggcatacatgcatcaacacagagggctcctacacgtgccagaagaacgtgcccaactgtggccgtggctaccatctcaacgaggagggaacgcgctgtgttgatgtggacgagtgcgcgccacctgctgagccctgtgggaagggacatcgctgcgtgaactctcccggcagtttccgctgcgaatgcaagacgggttactattttgacggcatcagcaggatgtgtgtcgatgtcaacgagtgccagcgctaccccgggcgcctgtgtggccacaagtgcgagaacacgctgggctcctacctctgcagctgttccgtgggcttccggctctctgtggatggcaggtcatgtgaagacatcaatgagtgcagcagcagcccctgtagccaggagtgtgccaacgtctacggctcctaccagtgttactgccggcgaggctaccagctcagcgatgtggatggagtcacctgtgaagacatcgacgagtgcgccctgcccaccgggggccacatctgctcctaccgctgcatcaacatccctggaagcttccagtgcagctgcccctcgtctggctacaggctggcccccaatggccgcaactgccaagacattgatgagtgtgtgactggcatccacaactgctccatcaacgagacctgcttcaacatccagggcggcttccgctgcctggccttcgagtgccctgagaactaccgccgctccgcagccacgcagaaatccaagaagggaaggcagaacaccccagcgggatcaagtaaagaggactgcagggttcttccatggaagcaggggttggaggatacccaccttgatgcctagtgaggaagatggacctggacagacagtcagctccacaccttgcgctgagcagctgtgattgtgccacgggagcatgagcccttttccccacggcccttgccactgtctcctggccctctctctgatcatgccaggtttgcaccagcctcgagtctcccatgttgtagtacattctccaagatgcagcccaggagcctctctgaaggaccagtctggttacgatggtctgagcttccttagaaccttccatggttgtcttttcccagcagatgaagcatagcctccttggaatggcatgggaggcctggcctgatctggcctctgcccaccctttgagctgcacctgccccaccccagctcatccatgtgcttgtaccctggccccacggggaggcttgcccttccctgaatctgccttcttgtggctttagcatgtgccatgctgtccccctgcagactgccattctccttgcagacttggctcagaagtcacctcctcagtgcagttagcctgagctcccctggccccaggtgcctccatcagagcatttaccccattgtgttgtggctgttccttaacgtccccactagccaggctctttgagggcagggattgtgtctggttaatttctgtattctctgcaactttgcaatgtttggcttgaagaaggagctcagtaaacatctgaataaacatgcaggttgatgg

SEQ ID NO: 18 - DNA, 2947 bp, Homo sapiens
ctcctcccgggcgggataattgaacggcgcggccctggcccagcgttggctgccgaggctcggccggagcgtggagcccgcgccgctgccccaggaccgcgcccgcgcctttgtccgccgccgcccaccgcccgtcgcccgccgcccatggagcgcgccgcgccgtcgcgccgggtcccgcttccgctgctgctgctcggcggccttgcgctgctggcggccggagtggacgcggatgtcctcctggaggcctgctgtgcggacggacaccggatggccactcatcagaaggactgctcgctgccatatgctacggaatccaaagaatgcaggatggtgcaggagcagtgctgccacagccagctggaggagctgcactgtgccacgggcatcagcctggccaacgagcaggaccgctgtgccacgccccacggtgacaacgccagcctggaggccacatttgtgaagaggtgctgccattgctgtctgctggggagggcggcccaggcccagggccagagctgcgagtacagcctcatggttggctaccagtgtggacaggtcttccgggcatgctgtgtcaagagccaggagaccggagatttggatgtcgggggcctccaagaaacggataagatcattgaggttgaggaggaacaagaggacccatatctgaatgaccgctgccgaggaggcgggccctgcaagcagcagtgccgagacacgggtgacgaggtggtctgctcctgcttcgtgggctaccagctgctgtctgatggtgtctcctgtgaagatgtcaatgaatgcatcacgggcagccacagctgccggcttggagaatcctgcatcaacacagtgggctctttccgctgccagcgggacagcagctgcgggactggctatgagctcacagaggacaatagctgcaaagatattgacgagtgtgagagtggtattcataactgcctccccgattttatctgtcagaatactctgggatccttccgctgccgacccaagctacagtgcaagagtggctttatacaagatgctctaggcaactgtattgatatcaatgagtgtttgagtatcagtgccccgtgccctatcgggcatacatgcatcaacacagagggctcctacacgtgccagaagaacgtgcccaactgtggccgtggctaccatctcaacgaggagggaacgcgctgtgttgatgtggacgagtgcgcgccacctgctgagccctgtgggaagggacatcgctgcgtgaactctcccggcagtttccgctgcgaatgcaagacgggttactattttgacggcatcagcaggatgtgtgtcgatgtcaacgagtgccagcgctaccccgggcgcctgtgtggccacaagtgcgagaacacgctgggctcctacctctgcagctgttccgtgggcttccggctctctgtggatggcaggtcatgtgaagacatcaatgagtgcagcagcagcccctgtagccaggagtgtgccaacgtctacggctcctaccagtgttactgccggcgaggctaccagctcagcgatgtggatggagtcacctgtgaagacatcgacgagtgcgccctgcccaccgggggccacatctgctcctaccgctgcatcaacatccctggaagcttccagtgcagctgcccctcgtctggctacaggctggcccccaatggccgcaactgccaagacattgatgagtgtgtgactggcatccacaactgctccatcaacgagacctgcttcaacatccagggcggcttccgctgcctggccttcgagtgccctgagaactaccgccgctccgcagccacgctccagcaggagaagacagacacggtccgctgcatcaagtcctgccgccccaacgatgtcacatgcgtgttcgaccccgtgcacaccatctcccacaccgtcatctcgctgcctaccttccgcgagttcacccgccctgaagagatcatcttcctccgggccatcacgccaccgcatcctgccagccaggctaacatcatcttcgacatcacggaagggaacctgcgggactcttttgacatcatcaagcgttacatggacggcatgaccgtgggtgtcgtgcgccaggtgcggcccatcgtgggcccatttcatgccgtcctgaagctggagatgaactatgtggtcgggggcgtggtctcccaccgaaatgttgtcaacgtccacatcttcgtctctgagtactggttctgagggctggtctgccgcacagccgcaggtgcacctccaggccaaatcattgctgccagtgactgtggtctgtacttgtttataccctcagacttttttaatgttaggtatttgtagcattaggccaacatgtattaagctgagccagatgaataagtccatctgatgtattttcggtgtttaaaaaatgagcccagttgctcaactgtttggttgaaaaccttgctcattttttaatgcgaaggctaagtgtcaccccctttctctgcctctggctgggccttgctaagggccaaggaaagaaagacattttttagggggcagccagtccaaatgccaaaagaagaccagttcttgccctgattgtatgaaatttgacattttggcactttttttttttttttggccaatcagattttctatgttctaaggacatggctgctgtagaatagcacagacgtggatgataaattatccccagaagcagcatgacagaatgcctcggggagcacttggaagggaaattgcagttctgttgaaatagaggaaaatcccttggtaaagacacagcctgttaggctcgtgtgggcctccagtatgttcaccaggggaatggctgggatttctcggcactctgcatcatccatcttttcttataggtgggaaaataaacaactttgtgatcctcctg

SEQ ID NO: 19 - DNA, 2485 bp, Homo sapiens
ctcctcccgggcgggataattgaacggcgcggccctggcccagcgttggctgccgaggctcggccggagcgtggagcccgcgccgctgccccaggaccgcgcccgcgcctttgtccgccgccgcccaccgcccgtcgcccgccgcccatggagcgcgccgcgccgtcgcgccgggtcccgcttccgctgctgctgctcggcggccttgcgctgctggcggccggagtggacgcggatgtcctcctggaggcctgctgtgcggacggacaccggatggccactcatcagaaggactgctcgctgccatatgctacggaatccaaagaatgcaggatggtgcaggagcagtgctgccacagccagctggaggagctgcactgtgccacgggcatcagcctggccaacgagcaggaccgctgtgccacgccccacggtgacaacgccagcctggaggccacatttgtgaagaggtgctgccattgctgtctgctggggagggcggcccaggcccagggccagagctgcgagtacagcctcatggttggctaccagtgtggacaggtcttccgggcatgctgtgtcaagagccaggagaccggagatttggatgtcgggggcctccaagaaacggataagatcattgaggttgaggaggaacaagaggacccatatctgaatgaccgctgccgaggaggcgggccctgcaagcagcagtgccgagacacgggtgacgaggtggtctgctcctgcttcgtgggctaccagctgctgtctgatggtgtctcctgtgaagatgtcaatgaatgcatcacgggcagccacagctgccggcttggagaatcctgcatcaacacagtgggctctttccgctgccagcgggacagcagctgcgggactggctatgagctcacagaggacaatagctgcaaagatattgacgagtgtgagagtggtattcataactgcctccccgattttatctgtcagaatactctgggatccttccgctgccgacccaagctacagtgcaagagtggctttatacaagatgctctaggcaactgtattgatatcaatgagtgtttgagtatcagtgccccgtgccctatcgggcatacatgcatcaacacagagggctcctacacgtgccagaagaacgtgcccaactgtggccgtggctaccatctcaacgaggagggaacgcgctgtgttgatgtggacgagtgcgcgccacctgctgagccctgtgggaagggacatcgctgcgtgaactctcccggcagtttccgctgcgaatgcaagacgggttactattttgacggcatcagcaggatgtgtgtcgatgtcaacgagtgccagcgctaccccgggcgcctgtgtggccacaagtgcgagaacacgctgggctcctacctctgcagctgttccgtgggcttccggctctctgtggatggcaggtcatgtgaagacatcaatgagtgcagcagcagcccctgtagccaggagtgtgccaacgtctacggctcctaccagtgttactgccggcgaggctaccagctcagcgatgtggatggagtcacctgtgaagacatcgacgagtgcgccctgcccaccgggggccacatctgctcctaccgctgcatcaacatccctggaagcttccagtgcagctgcccctcgtctggctacaggctggcccccaatggccgcaactgccaagacattgatgagtgtgtgactggcatccacaactgctccatcaacgagacctgcttcaacatccagggcggcttccgctgcctggccttcgagtgccctgagaactaccgccgctccgcagccacatgatcgtagggaactctgcatgaggccatcggtgcaggctggagaagagaaggcaagttggcaggagtggagaccacgggcatttgagccacttcctcatgtaacttaacttgtgccttcaggacctgctcaagcccgatcacgtatataccacttccatttgatgatggaatgctgctgttcatgaccaactttatggctagatgggtcagaaagcacccagttcatgataggcagttcaggtcatatggtgacttgatgacccagagtcaaacattcagtttccaccaaagcccagtaacaggccaagagctgtctctcaaaaggagagtagttatctgcagaagatggcagggccttgctccgaaagcctagagaccgccactgtgattcacctatgggggcctgccaaaggctgcagccagcatccttatctgccactgacacctcaagcaacattggatctgctgggtcatatggcccaagtggcagagcaacttgcacaacagcctggacctgtcatagagctttctcctgttctggaccccactcaaaactggcagcctttcaggtcactcgataaatgtgctggagtaacactcaaacgaggaatgtgttgcctccaaaatccaataggccc

SEQ ID NO: 20 - protein, 566 aa, Homo sapiens
MERAAPSRRVPLPLLLLGGLALLAAGVDADVLLEACCADGHRMATHQKDCSLPYATESKECRMVQEQCCHSQLEELHCATGISLANEQDRCATPHGDNASLEATFVKRCCHCCLLGRAAQAQGQSCEYSLMVGYQCGQVFRACCVKSQETGDLDVGGLQETDKIIEVEEEQEDPYLNDRCRGGGPCKQQCRDTGDEVVCSCFVGYQLLSDGVSCEDVNECITGSHSCRLGESCINTVGSFRCQRDSSCGTGYELTEDNSCKDIDECESGIHNCLPDFICQNTLGSFRCRPKLQCKSGFIQDALGNCIDINECLSISAPCPIGHTCINTEGSYTCQKNVPNCGRGYHLNEEGTRCVDVDECAPPAEPCGKGHRCVNSPGSFRCECKTGYYFDGISRMCVDVNECQRYPGRLCGHKCENTLGSYLCSCSVGFRLSVDGRSCEDINECSSSPCSQECANVYGSYQCYCRRGYQLSDVDGVTCEDIDECALPTGGHICSYRCINIPGSFQCSCPSSGYRLAPNGRNCQDIDECVTGIHNCSINETCFNIQGGFRCLAFECPENYRRSAAT

SEQ ID NO: 21 - protein, 601 aa, Homo sapiens
MERAAPSRRVPLPLLLLGGLALLAAGVDADVLLEACCADGHRMATHQKDCSLPYATESKECRMVQEQCCHSQLEELHCATGISLANEQDRCATPHGDNASLEATFVKRCCHCCLLGRAAQAQGQSCEYSLMVGYQCGQVFRACCVKSQETGDLDVGGLQETDKIIEVEEEQEDPYLNDRCRGGGPCKQQCRDTGDEVVCSCFVGYQLLSDGVSCEDVNECITGSHSCRLGESCINTVGSFRCQRDSSCGTGYELTEDNSCKDIDECESGIHNCLPDFICQNTLGSFRCRPKLQCKSGFIQDALGNCIDINECLSISAPCPIGHTCINTEGSYTCQKNVPNCGRGYHLNEEGTRCVDVDECAPPAEPCGKGHRCVNSPGSFRCECKTGYYFDGISRMCVDVNECQRYPGRLCGHKCENTLGSYLCSCSVGFRLSVDGRSCEDINECSSSPCSQECANVYGSYQCYCRRGYQLSDVDGVTCEDIDECALPTGGHICSYRCINIPGSFQCSCPSSGYRLAPNGRNCQDIDECVTGIHNCSINETCFNIQGGFRCLAFECPENYRRSAATQKSKKGRQNTPAGSSKEDCRVLPWKQGLEDTHLDA

SEQ ID NO: 22 - protein, 703 aa, Homo sapiens
MERAAPSRRVPLPLLLLGGLALLAAGVDADVLLEACCADGHRMATHQKDCSLPYATESKECRMVQEQCCHSQLEELHCATGISLANEQDRCATPHGDNASLEATFVKRCCHCCLLGRAAQAQGQSCEYSLMVGYQCGQVFRACCVKSQETGDLDVGGLQETDKIIEVEEEQEDPYLNDRCRGGGPCKQQCRDTGDEVVCSCFVGYQLLSDGVSCEDVNECITGSHSCRLGESCINTVGSFRCQRDSSCGTGYELTEDNSCKDIDECESGIHNCLPDFICQNTLGSFRCRPKLQCKSGFIQDALGNCIDINECLSISAPCPIGHTCINTEGSYTCQKNVPNCGRGYHLNEEGTRCVDVDECAPPAEPCGKGHRCVNSPGSFRCECKTGYYFDGISRMCVDVNECQRYPGRLCGHKCENTLGSYLCSCSVGFRLSVDGRSCEDINECSSSPCSQECANVYGSYQCYCRRGYQLSDVDGVTCEDIDECALPTGGHICSYRCINIPGSFQCSCPSSGYRLAPNGRNCQDIDECVTGIHNCSINETCFNIQGGFRCLAFECPENYRRSAATLQQEKTDTVRCIKSCRPNDVTCVFDPVHTISHTVISLPTFREFTRPEEIIFLRAITPPHPASQANIIFDITEGNLRDSFDIIKRYMDGMTVGVVRQVRPIVGPFHAVLKLEMNYVVGGVVSHRNVVNVHIFVSEYWF

SEQ ID NO: 23 - protein, 566 aa, Homo sapiens; identical to SEQ ID NO: 20

SEQ ID NO: 24 - DNA, 17 bp, Artificial Sequence
  FBLN1_forward primer
gcctggaggccacattt

SEQ ID NO: 25 - DNA, 20 bp, Artificial Sequence
  FBLN1_reverse primer
ccaaccatgaggctgtactc

SEQ ID NO: 26 - DNA, 21 bp, Artificial Sequence
  FBLN1 probe
tgctgccattgctgtctgctg

SEQ ID NO: 27 - DNA, 1797 bp, Homo sapiens
agggacggaggcccgcgctgcccaagagcgccacgggcggggcggggccggcggcgggctgcgggcgcggccggacgggagttccccggagaaggatcctgcagcccgagtcccgtcctcaggcttccccaatccaggggactcggcgccgggacgctgctatggacgacattttcactcagtgccgggagggcaacgcagtcgccgttcgcctgtggctggacaacacggagaacgacctcaaccagggggacgatcatggcttctcccccttgcactgggcctgccgagagggccgctctgctgtggttgagatgttgatcatgcggggggcacggatcaatgtaatgaaccgtggggatgacacccccctgcatctggcagccagtcatggacaccgtgatattgtacagaagctattgcagtacaaggcagacatcaatgcagtgaatgaacacgggaatgtgcccctgcactatgcctgtttttggggccaagatcaagtggcagaggacctggtggcaaatggggcccttgtcagcatctgtaacaagtatggagagatgcctgtggacaaagccaaggcacccctgagagagcttctccgagagcgggcagagaagatgggccagaatctcaaccgtattccatacaaggacacattctggaaggggaccacccgcactcggccccgaaatggaaccctgaacaaacactctggcattgacttcaaacagcttaacttcctgacgaagctcaacgagaatcactctggagagctatggaagggccgctggcagggcaatgacattgtcgtgaaggtgctgaaggttcgagactggagtacaaggaagagcagggacttcaatgaagagtgtccccggctcaggattttctcgcatccaaatgtgctcccagtgctaggtgcctgccagtctccacctgctcctcatcctactctcatcacacactggatgccgtatggatccctctacaatgtactacatgaaggcaccaatttcgtcgtggaccagagccaggctgtgaagtttgctttggacatggcaaggggcatggccttcctacacacactagagcccctcatcccacgacatgcactcaatagccgtagtgtaatgattgatgaggacatgactgcccgaattagcatggctgatgtcaagttctctttccaatgtcctggtcgcatgtatgcacctgcctgggtagcccccgaagctctgcagaagaagcctgaagacacaaacagacgctcagcagacatgtggagttttgcagtgcttctgtgggaactggtgacacgggaggtaccctttgctgacctctccaatatggagattggaatgaaggtggcattggaaggccttcggcctaccatcccaccaggtatttcccctcatgtgtgtaagctcatgaagatctgcatgaatgaagaccctgcaaagcgacccaaatttgacatgattgtgcctatccttgagaagatgcaggacaagtaggactggaaggtccttgcctgaactccagaggtgtcgggacatggttgggggaatgcacctccccaaagcagcaggcctctggttgcctcccccgcctccagtcatggtactaccccagccatggggtccatccccttcccccatccctaccactgtggccccaagaggggcgggctcagagctttgtcacttgccacatggtgtctcccaacatgggagggatcagccccgcctgtcacaataaagtttattatgaaaacaggaaaaaaaaaaaaaa

SEQ ID NO: 28 - DNA, 2098 bp, Homo sapiens
agcccgagtcccggtgagtgcgagaggacccgcgccccctgtcacccctcacttctcctgagtcccaagtaaggaacggagccaaccctggggaggacccccggtcccctctcccagagtatacggagcctgaacctccccacttcccccaactctgttcgcggatagggtctagttgcctgctctcggacatccgttcagcagacactacctcttcgtcaccccctgcccaccctgacccgcctttacctcgcgtctagaggacacagccagggatcatcccgcagccccgaactccttcacagacccccactagccggggacgcagctcaggccccctacccccaacacaaacacttctctcctgtagaggataaagcttggggttcatcctccttccctggatcactccacagtcctcaggcttccccaatccaggggactcggcgccgggacgctgctatggacgacattttcactcagtgccgggagggcaacgcagtcgccgttcgcctgtggctggacaacacggagaacgacctcaaccagggggacgatcatggcttctcccccttgcactgggcctgccgagagggccgctctgctgtggttgagatgttgatcatgcggggggcacggatcaatgtaatgaaccgtggggatgacacccccctgcatctggcagccagtcatggacaccgtgatattgtacagaagctattgcagtacaaggcagacatcaatgcagtgaatgaacacgggaatgtgcccctgcactatgcctgtttttggggccaagatcaagtggcagaggacctggtggcaaatggggcccttgtcagcatctgtaacaagtatggagagatgcctgtggacaaagccaaggcacccctgagagagcttctccgagagcgggcagagaagatgggccagaatctcaaccgtattccatacaaggacacattctggaaggggaccacccgcactcggccccgaaatggaaccctgaacaaacactctggcattgacttcaaacagcttaacttcctgacgaagctcaacgagaatcactctggagagctatggaagggccgctggcagggcaatgacattgtcgtgaaggtgctgaaggttcgagactggagtacaaggaagagcagggacttcaatgaagagtgtccccggctcaggattttctcgcatccaaatgtgctcccagtgctaggtgcctgccagtctccacctgctcctcatcctactctcatcacacactggatgccgtatggatccctctacaatgtactacatgaaggcaccaatttcgtcgtggaccagagccaggctgtgaagtttgctttggacatggcaaggggcatggccttcctacacacactagagcccctcatcccacgacatgcactcaatagccgtagtgtaatgattgatgaggacatgactgcccgaattagcatggctgatgtcaagttctctttccaatgtcctggtcgcatgtatgcacctgcctgggtagcccccgaagctctgcagaagaagcctgaagacacaaacagacgctcagcagacatgtggagttttgcagtgcttctgtgggaactggtgacacgggaggtaccctttgctgacctctccaatatggagattggaatgaaggtggcattggaaggccttcggcctaccatcccaccaggtatttcccctcatgtgtgtaagctcatgaagatctgcatgaatgaagaccctgcaaagcgacccaaatttgacatgattgtgcctatccttgagaagatgcaggacaagtaggactggaaggtccttgcctgaactccagaggtgtcgggacatggttgggggaatgcacctccccaaagcagcaggcctctggttgcctcccccgcctccagtcatggtactaccccagccatggggtccatccccttcccccatccctaccactgtggccccaagaggggcgggctcagagctttgtcacttgccacatggtgtctcccaacatgggagggatcagccccgcctgtcacaataaagtttattatgaaaacaggaaaaaaaaaaaaaa

SEQ ID NO: 29 - DNA, 1660 bp, Homo sapiens
agggacggaggcccgcgctgcccaagagcgccacgggcggggcggggccggcggcgggctgcgggcgcggccggacgggagttccccggagaaggatcctgcagcccgagtcccgaggataaagcttggggttcatcctccttccctggatcactccacagtcctcaggcttccccaatccaggggactcggcgccgggacgctgctatggacgacattttcactcagtgccgggagggcaacgcagtcgccgttcgcctgtggctggacaacacggagaacgacctcaaccagggggacgatcatggcttctcccccttgcactgggcctgccgagagggccgctctgctgtggttgagatgttgatcatgcggggggcacggatcaatgtaatgaaccgtggggatgacacccccctgcatctggcagccagtcatggacaccgtgatattgtacagaagctattgcagtacaaggcagacatcaatgcagtgaatgaacacgggaatgtgcccctgcactatgcctgtttttggggccaagatcaagtggcagagagcgggcagagaagatgggccagaatctcaaccgtattccatacaaggacacattctggaaggggaccacccgcactcggccccctatggaagggccgctggcagggcaatgacattgtcgtgaaggtgctgaaggttcgagactggagtacaaggaagagcagggacttcaatgaagagtgtccccggctcaggattttctcgcatccaaatgtgctcccagtgctaggtgcctgccagtctccacctgctcctcatcctactctcatcacacactggatgccgtatggatccctctacaatgtactacatgaaggcaccaatttcgtcgtggaccagagccaggctgtgaagtttgctttggacatggcaaggggcatggccttcctacacacactagagcccctcatcccacgacatgcactcaatagccgtagtgtaatgattgatgaggacatgactgcccgaattagcatggctgatgtcaagttctctttccaatgtcctggtcgcatgtatgcacctgcctgggtagcccccgaagctctgcagaagaagcctgaagacacaaacagacgctcagcagacatgtggagttttgcagtgcttctgtgggaactggtgacacgggaggtaccctttgctgacctctccaatatggagattggaatgaaggtggcattggaaggccttcggcctaccatcccaccaggtatttcccctcatgtgtgtaagctcatgaagatctgcatgaatgaagaccctgcaaagcgacccaaatttgacatgattgtgcctatccttgagaagatgcaggacaagtaggactggaaggtccttgcctgaactccagaggtgtcgggacatggttgggggaatgcacctccccaaagcagcaggcctctggttgcctcccccgcctccagtcatggtactaccccagccatggggtccatccccttcccccatccctaccactgtggccccaagaggggcgggctcagagctttgtcacttgccacatggtgtctcccaacatgggagggatcagccccgcctgtcacaataaagtttattatgaaaacaggaaaaaaaaaaaaaa

SEQ ID NO: 30 - DNA, 1631 bp, Homo sapiens
agggacggaggcccgcgctgcccaagagcgccacgggcggggcggggccggcggcgggctgcgggcgcggccggacgggagttccccggagaaggatcctgcagcccgagtcccgtcctcaggcttccccaatccaggggactcggcgccgggacgctgctatggacgacattttcactcagtgccgggagggcaacgcagtcgccgttcgcctgtggctggacaacacggagaacgacctcaaccagggctattgcagtacaaggcagacatcaatgcagtgaatgaacacgggaatgtgcccctgcactatgcctgtttttggggccaagatcaagtggcagaggacctggtggcaaatggggcccttgtcagcatctgtaacaagtatggagagatgcctgtggacaaagccaaggcacccctgagagagcttctccgagagcgggcagagaagatgggccagaatctcaaccgtattccatacaaggacacattctggaaggggaccacccgcactcggccccgaaatggaaccctgaacaaacactctggcattgacttcaaacagcttaacttcctgacgaagctcaacgagaatcactctggagagctatggaagggccgctggcagggcaatgacattgtcgtgaaggtgctgaaggttcgagactggagtacaaggaagagcagggacttcaatgaagagtgtccccggctcaggattttctcgcatccaaatgtgctcccagtgctaggtgcctgccagtctccacctgctcctcatcctactctcatcacacactggatgccgtatggatccctctacaatgtactacatgaaggcaccaatttcgtcgtggaccagagccaggctgtgaagtttgctttggacatggcaaggggcatggccttcctacacacactagagcccctcatcccacgacatgcactcaatagccgtagtgtaatgattgatgaggacatgactgcccgaattagcatggctgatgtcaagttctctttccaatgtcctggtcgcatgtatgcacctgcctgggtagcccccgaagctctgcagaagaagcctgaagacacaaacagacgctcagcagacatgtggagttttgcagtgcttctgtgggaactggtgacacgggaggtaccctttgctgacctctccaatatggagattggaatgaaggtggcattggaaggccttcggcctaccatcccaccaggtatttcccctcatgtgtgtaagctcatgaagatctgcatgaatgaagaccctgcaaagcgacccaaatttgacatgattgtgcctatccttgagaagatgcaggacaagtaggactggaaggtccttgcctgaactccagaggtgtcgggacatggttgggggaatgcacctccccaaagcagcaggcctctggttgcctcccccgcctccagtcatggtactaccccagccatggggtccatccccttcccccatccctaccactgtggccccaagaggggcgggctcagagctttgtcacttgccacatggtgtctcccaacatgggagggatcagccccgcctgtcacaataaagtttattatgaaaacaggaaaaaaaaaaaaaa

SEQ ID NO: 31 - DNA, 1843 bp, Homo sapiens
agggacggaggcccgcgctgcccaagagcgccacgggcggggcggggccggcggcgggctgcgggcgcggccggacgggagttccccggagaaggatcctgcagcccgagtcccgaggataaagcttggggttcatcctccttccctggatcactccacagtcctcaggcttccccaatccaggggactcggcgccgggacgctgctatggacgacattttcactcagtgccgggagggcaacgcagtcgccgttcgcctgtggctggacaacacggagaacgacctcaaccagggggacgatcatggcttctcccccttgcactgggcctgccgagagggccgctctgctgtggttgagatgttgatcatgcggggggcacggatcaatgtaatgaaccgtggggatgacacccccctgcatctggcagccagtcatggacaccgtgatattgtacagaagctattgcagtacaaggcagacatcaatgcagtgaatgaacacgggaatgtgcccctgcactatgcctgtttttggggccaagatcaagtggcagaggacctggtggcaaatggggcccttgtcagcatctgtaacaagtatggagagatgcctgtggacaaagccaaggcacccctgagagagcttctccgagagcgggcagagaagatgggccagaatctcaaccgtattccatacaaggacacattctggaaggggaccacccgcactcggccccgaaatggaaccctgaacaaacactctggcattgacttcaaacagcttaacttcctgacgaagctcaacgagaatcactctggagagctatggaagggccgctggcagggcaatgacattgtcgtgaaggtgctgaaggttcgagactggagtacaaggaagagcagggacttcaatgaagagtgtccccggctcaggattttctcgcatccaaatgtgctcccagtgctaggtgcctgccagtctccacctgctcctcatcctactctcatcacacactggatgccgtatggatccctctacaatgtactacatgaaggcaccaatttcgtcgtggaccagagccaggctgtgaagtttgctttggacatggcaaggggcatggccttcctacacacactagagcccctcatcccacgacatgcactcaatagccgtagtgtaatgattgatgaggacatgactgcccgaattagcatggctgatgtcaagttctctttccaatgtcctggtcgcatgtatgcacctgcctgggtagcccccgaagctctgcagaagaagcctgaagacacaaacagacgctcagcagacatgtggagttttgcagtgcttctgtgggaactggtgacacgggaggtaccctttgctgacctctccaatatggagattggaatgaaggtggcattggaaggccttcggcctaccatcccaccaggtatttcccctcatgtgtgtaagctcatgaagatctgcatgaatgaagaccctgcaaagcgacccaaatttgacatgattgtgcctatccttgagaagatgcaggacaagtaggactggaaggtccttgcctgaactccagaggtgtcgggacatggttgggggaatgcacctccccaaagcagcaggcctctggttgcctcccccgcctccagtcatggtactaccccagccatggggtccatccccttcccccatccctaccactgtggccccaagaggggcgggctcagagctttgtcacttgccacatggtgtctcccaacatgggagggatcagccccgcctgtcacaataaagtttattatgaaaacaggaaaaaaaaaaaaaa

SEQ ID NO: 32 - protein, 452 aa, Homo sapiens
MDDIFTQCREGNAVAVRLWLDNTENDLNQGDDHGFSPLHWACREGRSAVVEMLIMRGARINVMNRGDDTPLHLAASHGHRDIVQKLLQYKADINAVNEHGNVPLHYACFWGQDQVAEDLVANGALVSICNKYGEMPVDKAKAPLRELLRERAEKMGQNLNRIPYKDTFWKGTTRTRPRNGTLNKHSGIDFKQLNFLTKLNENHSGELWKGRWQGNDIVVKVLKVRDWSTRKSRDFNEECPRLRIFSHPNVLPVLGACQSPPAPHPTLITHWMPYGSLYNVLHEGTNFVVDQSQAVKFALDMARGMAFLHTLEPLIPRHALNSRSVMIDEDMTARISMADVKFSFQCPGRMYAPAWVAPEALQKKPEDTNRRSADMWSFAVLLWELVTREVPFADLSNMEIGMKVALEGLRPTIPPGISPHVCKLMKICMNEDPAKRPKFDMIVPILEKMQDK

SEQ ID NO: 33 - protein, 452 aa, Homo sapiens; identical to SEQ ID NO: 32

SEQ ID NO: 34 - protein, 391 aa, Homo sapiens
MDDIFTQCREGNAVAVRLWLDNTENDLNQGDDHGFSPLHWACREGRSAVVEMLIMRGARINVMNRGDDTPLHLAASHGHRDIVQKLLQYKADINAVNEHGNVPLHYACFWGQDQVAESGQRRWARISTVFHTRTHSGRGPPALGPLWKGRWQGNDIVVKVLKVRDWSTRKSRDFNEECPRLRIFSHPNVLPVLGACQSPPAPHPTLITHWMPYGSLYNVLHEGTNFVVDQSQAVKFALDMARGMAFLHTLEPLIPRHALNSRSVMIDEDMTARISMADVKFSFQCPGRMYAPAWVAPEALQKKPEDTNRRSADMWSFAVLLWELVTREVPFADLSNMEIGMKVALEGLRPTIPPGISPHVCKLMKICMNEDPAKRPKFDMIVPILEKMQDK

SEQ ID NO: 35 - protein, 318 aa, Homo sapiens
MPVDKAKAPLRELLRERAEKMGQNLNRIPYKDTFWKGTTRTRPRNGTLNKHSGIDFKQLNFLTKLNENHSGELWKGRWQGNDIVVKVLKVRDWSTRKSRDFNEECPRLRIFSHPNVLPVLGACQSPPAPHPTLITHWMPYGSLYNVLHEGTNFVVDQSQAVKFALDMARGMAFLHTLEPLIPRHALNSRSVMIDEDMTARISMADVKFSFQCPGRMYAPAWVAPEALQKKPEDTNRRSADMWSFAVLLWELVTREVPFADLSNMEIGMKVALEGLRPTIPPGISPHVCKLMKICMNEDPAKRPKFDMIVPILEKMQDK

SEQ ID NO: 36 - protein, 452 aa, Homo sapiens; identical to SEQ ID NO: 32

SEQ ID NO: 37 - DNA, 21 bp, Artificial Sequence
  ILK_forward primer
catccaaatgtgctcccagtg

SEQ ID NO: 38 - DNA, 20 bp, Artificial Sequence
  ILK_reverse primer
tggctctggtccacgacgaa

SEQ ID NO: 39 - DNA, 22 bp, Artificial Sequence
  ILK probe
tgcctgccagtctccacctgct

SEQ ID NO: 40 - DNA, 1861 bp, Homo sapiens
cactcaaggtgtgcaggcagctgtgtttgtcaggaaggcagaaggagttggctttgctttaggggaggagacgaggtcccacaacaccctctgaagggtatataaggagccccagcgtgcagcctggcctggtacctcctgccagcatctcttgggtttgctgagaactcacgggctccagctacctggccatgaccaccacatttctgcaaacttcttcctccacctttgggggtggctcaacccgagggggttccctcctggctgggggaggtggctttggtggggggagtctctctgggggaggtggaagccgaagtatctcagcttcttctgctaggtttgtctcttcagggtcaggaggaggatatgggggtggcatgagggtctgtggctttggtggaggggctggtagtgttttcggtggaggctttggagggggcgttggtgggggttttggtggtggctttggtggtggcgatggtggtctcctctctggcaatgagaaaattaccatgcagaacctcaatgaccgcctggcctcctacctggacaaggtacgtgccctggaggaggccaatgctgacctggaggtgaagatccatgactggtaccagaagcagaccccaaccagcccagaatgcgactacagccaatacttcaagaccattgaagagctccgggacaagatcatggccaccaccatcgacaactcccgggtcatcctggagatcgacaatgccaggctggctgcggacgacttcaggctcaagtatgagaatgagctggccctgcgccagggcgttgaggctgacatcaacggcttgcgccgagtcctggatgagctgaccctggccaggactgacctggagatgcagatcgagggcctgaatgaggagctagcctacctgaagaagaaccacgaagaggagatgaaggagttcagcagccagctggccggccaggtcaatgtggagatggacgcagcaccgggtgtggacctgacccgtgtgctggcagagatgagggagcagtacgaggccatggcggagaagaaccgccgggatgtcgaggcctggttcttcagcaagactgaggagctgaacaaagaggtggcctccaacacagaaatgatccagaccagcaagacggagatcacagacctgagacgcacgatgcaggagctggagatcgagctgcagtcccagctcagcatgaaagctgggctggagaactcactggccgagacagagtgccgctatgccacgcagctgcagcagatccaggggctcattggtggcctggaggcccagctgagtgagctccgatgcgagatggaggctcagaaccaggagtacaagatgctgcttgacataaagacacggctggagcaggagatcgctacttaccgcagcctgctcgagggccaggatgccaagatggctggcattggcatcagggaagcctcttcaggaggtggtggtagcagcagcaatttccacatcaatgtagaagagtcagtggatggacaggtggtttcttcccacaagagagaaatctaagtgtctattgcaggagaaacgtcccttgccactccccactctcatcaggccaagtggaggactggccagagggcctgcacatgcaaactccagtccctgccttcagagagctgaaaagggtccctcggtcttttatttcagggctttgcatgcgctctattccccctctgcctctccccaccttctttggagcaaggagatgcagctgtattgtgtaacaagctcatttgtacagtgtctgttcatgtaataaagaattacttttccttttgcaaataaaaaaaaaaaaaaaaaaaaaa

SEQ ID NO: 41 - protein, 456 aa, Homo sapiens
MTTTFLQTSSSTFGGGSTRGGSLLAGGGGFGGGSLSGGGGSRSISASSARFVSSGSGGGYGGGMRVCGFGGGAGSVFGGGFGGGVGGGFGGGFGGGDGGLLSGNEKITMQNLNDRLASYLDKVRALEEANADLEVKIHDWYQKQTPTSPECDYSQYFKTIEELRDKIMATTIDNSRVILEIDNARLAADDFRLKYENELALRQGVEADINGLRRVLDELTLARTDLEMQIEGLNEELAYLKKNHEEEMKEFSSQLAGQVNVEMDAAPGVDLTRVLAEMREQYEAMAEKNRRDVEAWFFSKTEELNKEVASNTEMIQTSKTEITDLRRTMQELEIELQSQLSMKAGLENSLAETECRYATQLQQIQGLIGGLEAQLSELRCEMEAQNQEYKMLLDIKTRLEQEIATYRSLLEGQDAKMAGIGIREASSGGGGSSSNFHINVEESVDGQVVSSHKREI

SEQ ID NO: 42 - DNA, 21 bp, Artificial Sequence
  KRT15_forward primer
gctagcctacctgaagaagaa

SEQ ID NO: 43 - DNA, 18 bp, Artificial Sequence
  KRT15_reverse primer
ccagctggctgctgaact

SEQ ID NO: 44 - DNA, 20 bp, Artificial Sequence
  KRT15 probe
ccacgaagaggagatgaagg

SEQ ID NO: 45 - DNA, 3123 bp, Homo sapiens
ttggctacatcggacccagatgactgcctcctcacttcctccctcccgattccgccgcggcccccaaagactctcggggtggccccttgtccgcaccgcttggagggagtgtgctctgagttaagctggtctcttctggtcctggaaaaaaatgagtattgacaaggttgctggatctgcgcagaaaagaaagtgccacttaataaaaaatttagcccggcagtggtaccgtctgcagagcttgctgcccttggacgttagcaggaagccttcggggtgctgtaatcggcgggcagaggagagggaggccgcggaattaaaaggaacaaaagctagagcgccatgccaaacgtccccggcaagacccagttaggcaggagccgggagtgatgggaaaatgaactagaacatattggagaattgggagaagtctctttggtttggaaaaaaaaaaaaggaatcttcagcctagatcactttcttatccggactgggatattaaatatacgacacatccaggagtttattggagcgcagactgatggcgcaaaggtacgatgagctgccccattacggcgggatggacggagtaggggttcccgcttccatgtacggagaccctcacgcgccgcggccgatccccccggttcaccacctgaaccacgggccgccgctccacgccacacagcactacggcgcgcacgccccgcaccccaatgtcatgccggccagtatgggatccgctgtcaacgacgccttgaagcgggacaaggacgcgatctatgggcacccgttgtttcctctgttagctctggtctttgagaagtgcgagctggcgacctgcactccccgggaacctggagtggctggcggagacgtctgctcctccgactccttcaacgaggacatcgcggtcttcgccaagcaggttcgcgccgaaaagccacttttttcctcaaatccagagctggacaatttgatgatacaagcaatacaagtactaaggtttcatcttttggagttagaaaaggtccacgaactgtgcgataacttctgccaccgatacattagctgtttgaaggggaaaatgcccatcgacctcgtcattgatgaaagagacggcagctccaagtcagatcatgaagaactttcaggctcctccacaaatctcgctgaccataacccttcttcttggcgagaccacgatgatgcaacctcaacccactcagcaggcaccccagggccctccagtgggggccatgcttcccagagcggagacaacagcagtgagcaaggggatggtttagacaacagtgtagcttcacctggtacaggtgacgatgatgatccggataaggacaaaaaacgccagaagaaaagaggcattttccccaaagtagcaacaaatatcatgagagcatggctcttccagcatctcacacatccgtacccttccgaagagcagaagaaacagttagcgcaagacacaggacttacaattctccaagtaaacaactggtttattaatgccagaagaagaatagtacagcccatgattgaccagtcaaatcgagcagtgagccaaggagcagcatatagtccagagggtcagcccatggggagctttgtgttggatggtcagcaacacatggggatccggcctgcaggtttgcagagcatgccaggggactacgtttctcagggtggtcctatgggaatgagtatggcacagccaagttacactcctccccagatgaccccacaccctactcaattaagacatggacccccaatgcattcatatttgccaagccatccccaccacccagccatgatgatgcacggaggaccccctacccaccctggaatgactatgtcagcacagagccccacaatgttaaattctgtagatcccaatgttggcggacaggttatggacattcatgcccaatagtataagggaactcaagggaaaaggaaacacacgcaaaaactattttaagactttctgaactttgaccagatgttgacacttaatatgaaattccagacagctgtgattattttttacttttgtcatttttcatcaagcaacagaggaccaatgcaacaagaacacaaatgtgaaatcatgggctgactgagacaattctgtccatgtaaagatcctctggaaaaagactccgagagttataactactgtagtataaatataggaactaagttaaacttgtacatttctgttgatcacgccgttatgttgcctcaaatagttttagaagagaaaaaaaaatatatccttgttttccacactatgtgtgttgttcccaaaagaatgactgttttggttcatcagtgaattcaccatccaggagagactgtggtatatattttaaacctgttgggccaatgagaaaagaaccacactggagatcatgatgaacttttggctgaacctcatcactcgaactccagcttcaagaatgtgttttcatgcccggcctttgttcctccataaatgtgtcctttagtttcaaacagatctttatagttcgtgcttcataagccaattcttattattatttttgggggactcttcttcaaagagcttgccaatgaagatttaaagacagagcaggagcttcttccaggagttctgagccttggttgtggacaaaacaatcttaagttgggcagctttcctcaacacaaaaaaaagttattaatggtcattgaaccataactaggactttatcagaaactcaaagcttgggggataaaaaggagcaagagaatactgtaacaaacttcgtacagagttcggtctattaattgtttcatgttagatattctatgtgtttacctcaattgaaaaaaaaaagaatgtttttgctagtatcagatctgctgtggaattggtattgtatgtccatgaattcttcttttctcagcacgtgttcctcactagaagaaaatgctgttacctttaagctttgtcaaatttacattaaaatacttgtatgaggactgtgacgttatgttaaaaaaaaaaaggtgttaagtcacaaaaagcggtaataaatatttcatttttgattttttgttaaaaaaaaaaaaaaaaaa

SEQ ID NO: 46 - DNA, 3074 bp, Homo sapiens
ttggctacatcggacccagatgactgcctcctcacttcctccctcccgattccgccgcggcccccaaagactctcggggtggccccttgtccgcaccgcttggagggagtgtgctctgagttaagctggtctcttctggtcctggaaaaaaatgagtattgacaaggttgctggatctgcgcagaaaagaaagtgccacttaataaaaaatttagcccggcagtggtaccgtctgcagagcttgctgcccttggacgttagcaggaagccttcggggtgctgtaatcggcgggcagaggagagggaggccgcggaattaaaaggaacaaaagctagagcgccatgccaaacgtccccggcaagacccagttaggcaggagccgggagtgatgggaaaatgaactagaatacgatgagctgccccattacggcgggatggacggagtaggggttcccgcttccatgtacggagaccctcacgcgccgcggccgatccccccggttcaccacctgaaccacgggccgccgctccacgccacacagcactacggcgcgcacgccccgcaccccaatgtcatgccggccagtatgggatccgctgtcaacgacgccttgaagcgggacaaggacgcgatctatgggcacccgttgtttcctctgttagctctggtctttgagaagtgcgagctggcgacctgcactccccgggaacctggagtggctggcggagacgtctgctcctccgactccttcaacgaggacatcgcggtcttcgccaagcaggttcgcgccgaaaagccacttttttcctcaaatccagagctggacaatttgatgatacaagcaatacaagtactaaggtttcatcttttggagttagaaaaggtccacgaactgtgcgataacttctgccaccgatacattagctgtttgaaggggaaaatgcccatcgacctcgtcattgatgaaagagacggcagctccaagtcagatcatgaagaactttcaggctcctccacaaatctcgctgaccataacccttcttcttggcgagaccacgatgatgcaacctcaacccactcagcaggcaccccagggccctccagtgggggccatgcttcccagagcggagacaacagcagtgagcaaggggatggtttagacaacagtgtagcttcacctggtacaggtgacgatgatgatccggataaggacaaaaaacgccagaagaaaagaggcattttccccaaagtagcaacaaatatcatgagagcatggctcttccagcatctcacacatccgtacccttccgaagagcagaagaaacagttagcgcaagacacaggacttacaattctccaagtaaacaactggtttattaatgccagaagaagaatagtacagcccatgattgaccagtcaaatcgagcagtgagccaaggagcagcatatagtccagagggtcagcccatggggagctttgtgttggatggtcagcaacacatggggatccggcctgcaggacctatgagtggaatgggcatgaatatgggcatggatgggcaatggcactacatgtaaccttcatcatgtaaagcaatcgcaaagcaagggggaagtttgcagagcatgccaggggactacgtttctcagggtggtcctatgggaatgagtatggcacagccaagttacactcctccccagatgaccccacaccctactcaattaagacatggacccccaatgcattcatatttgccaagccatccccaccacccagccatgatgatgcacggaggaccccctacccaccctggaatgactatgtcagcacagagccccacaatgttaaattctgtagatcccaatgttggcggacaggttatggacattcatgcccaatagtataagggaactcaagggaaaaggaaacacacgcaaaaactattttaagactttctgaactttgaccagatgttgacacttaatatgaaattccagacagctgtgattattttttacttttgtcatttttcatcaagcaacagaggaccaatgcaacaagaacacaaatgtgaaatcatgggctgactgagacaattctgtccatgtaaagatcctctggaaaaagactccgagagttataactactgtagtataaatataggaactaagttaaacttgtacatttctgttgatcacgccgttatgttgcctcaaatagttttagaagagaaaaaaaaatatatccttgttttccacactatgtgtgttgttcccaaaagaatgactgttttggttcatcagtgaattcaccatccaggagagactgtggtatatattttaaacctgttgggccaatgagaaaagaaccacactggagatcatgatgaacttttggctgaacctcatcactcgaactccagcttcaagaatgtgttttcatgcccggcctttgttcctccataaatgtgtcctttagtttcaaacagatctttatagttcgtgcttcataagccaattcttattattatttttgggggactcttcttcaaagagcttgccaatgaagatttaaagacagagcaggagcttcttccaggagttctgagccttggttgtggacaaaacaatcttaagttgggcagctttcctcaacacaaaaaaaagttattaatggtcattgaaccataactaggactttatcagaaactcaaagcttgggggataaaaaggagcaagagaatactgtaacaaacttcgtacagagttcggtctattaattgtttcatgttagatattctatgtgtttacctcaattgaaaaaaaaaagaatgtttttgctagtatcagatctgctgtggaattggtattgtatgtccatgaattcttcttttctcagcacgtgttcctcactagaagaaaatgctgttacctttaagctttgtcaaatttacattaaaatacttgtatgaggactgtgacgttatgttaaaaaaaaaaaggtgttaagtcacaaaaagcggtaataaatatttcatttttgattttttgttaaaaaaaaaaaaaaaaaa

SEQ ID NO: 47 - DNA, 3352 bp, Homo sapiens
tttaaagagagaggatcgtattatagataccgcgggggcaaagctaaaaaaggggggaggggggaggaaaaaattcaagaagcagaaacccctcgcggagttttactggaagaaaaaaacgggtctgaaagattcctcctcttcatcatcatcaaccatcattcattcactaccttgacattccgggctttgattgacagctggagtggcaaaaagccatgaaacacgacagttcggttacatgtgggctgctgacgggccgctcgtaaccttcagttcgggggcttgacaatttttttcttctttttcttctttttcttttctttctttttttttccaactgaggggaagagaagagaaagagggggaaaggaggaccgaagaggaggaggaggggaggggggaggaggaggaggtggaggaggaggaggaagatcaggaggaggaggaagaagaggaaaaaagagaaaaagaagaaatatcacagaaaaaaaaattcttcgttgtctagactgggctttttttcccccctaaaaaatagcatattggagaattgggagaagtctctttggtttggaaaaaaaaaaaaggaatcttcagcctagatcactttcttatccggactgggatattaaatatacgacacatccaggagtttattggagcgcagactgatggcgcaaaggtacgatgagctgccccattacggcgggatggacggagtaggggttcccgcttccatgtacggagaccctcacgcgccgcggccgatccccccggttcaccacctgaaccacgggccgccgctccacgccacacagcactacggcgcgcacgccccgcaccccaatgtcatgccggccagtatgggatccgctgtcaacgacgccttgaagcgggacaaggacgcgatctatgggcacccgttgtttcctctgttagctctggtctttgagaagtgcgagctggcgacctgcactccccgggaacctggagtggctggcggagacgtctgctcctccgactccttcaacgaggacatcgcggtcttcgccaagcaggttcgcgccgaaaagccacttttttcctcaaatccagagctggacaatttgatgatacaagcaatacaagtactaaggtttcatcttttggagttagaaaaggtccacgaactgtgcgataacttctgccaccgatacattagctgtttgaaggggaaaatgcccatcgacctcgtcattgatgaaagagacggcagctccaagtcagatcatgaagaactttcaggctcctccacaaatctcgctgaccataacccttcttcttggcgagaccacgatgatgcaacctcaacccactcagcaggcaccccagggccctccagtgggggccatgcttcccagagcggagacaacagcagtgagcaaggggatggtttagacaacagtgtagcttcacctggtacaggtgacgatgatgatccggataaggacaaaaaacgccagaagaaaagaggcattttccccaaagtagcaacaaatatcatgagagcatggctcttccagcatctcacacatccgtacccttccgaagagcagaagaaacagttagcgcaagacacaggacttacaattctccaagtaaacaactggtttattaatgccagaagaagaatagtacagcccatgattgaccagtcaaatcgagcagtgagccaaggagcagcatatagtccagagggtcagcccatggggagctttgtgttggatggtcagcaacacatggggatccggcctgcaggacctatgagtggaatgggcatgaatatgggcatggatgggcaatggcactacatgtaaccttcatcatgtaaagcaatcgcaaagcaagggggaagtttgcagagcatgccaggggactacgtttctcagggtggtcctatgggaatgagtatggcacagccaagttacactcctccccagatgaccccacaccctactcaattaagacatggacccccaatgcattcatatttgccaagccatccccaccacccagccatgatgatgcacggaggaccccctacccaccctggaatgactatgtcagcacagagccccacaatgttaaattctgtagatcccaatgttggcggacaggttatggacattcatgcccaatagtataagggaactcaagggaaaaggaaacacacgcaaaaactattttaagactttctgaactttgaccagatgttgacacttaatatgaaattccagacagctgtgattattttttacttttgtcatttttcatcaagcaacagaggaccaatgcaacaagaacacaaatgtgaaatcatgggctgactgagacaattctgtccatgtaaagatcctctggaaaaagactccgagagttataactactgtagtataaatataggaactaagttaaacttgtacatttctgttgatcacgccgttatgttgcctcaaatagttttagaagagaaaaaaaaatatatccttgttttccacactatgtgtgttgttcccaaaagaatgactgttttggttcatcagtgaattcaccatccaggagagactgtggtatatattttaaacctgttgggccaatgagaaaagaaccacactggagatcatgatgaacttttggctgaacctcatcactcgaactccagcttcaagaatgtgttttcatgcccggcctttgttcctccataaatgtgtcctttagtttcaaacagatctttatagttcgtgcttcataagccaattcttattattatttttgggggactcttcttcaaagagcttgccaatgaagatttaaagacagagcaggagcttcttccaggagttctgagccttggttgtggacaaaacaatcttaagttgggcagctttcctcaacacaaaaaaaagttattaatggtcattgaaccataactaggactttatcagaaactcaaagcttgggggataaaaaggagcaagagaatactgtaacaaacttcgtacagagttcggtctattaattgtttcatgttagatattctatgtgtttacctcaattgaaaaaaaaaagaatgtttttgctagtatcagatctgctgtggaattggtattgtatgtccatgaattcttcttttctcagcacgtgttcctcactagaagaaaatgctgttacctttaagctttgtcaaatttacattaaaatacttgtatgaggactgtgacgttatgttaaaaaaaaaaaggtgttaagtcacaaaaagcggtaataaatatttcatttttgattttttgttaaaaaaaaaaaaaaaaaa

SEQ ID NO: 48 - DNA, 3277 bp, Homo sapiens
tttaaagagagaggatcgtattatagataccgcgggggcaaagctaaaaaaggggggaggggggaggaaaaaattcaagaagcagaaacccctcgcggagttttactggaagaaaaaaacgggtctgaaagattcctcctcttcatcatcatcaaccatcattcattcactaccttgacattccgggctttgattgacagctggagtggcaaaaagccatgaaacacgacagttcggttacatgtgggctgctgacgggccgctcgtaaccttcagttcgggggcttgacaatttttttcttctttttcttctttttcttttctttctttttttttccaactgaggggaagagaagagaaagagggggaaaggaggaccgaagaggaggaggaggggaggggggaggaggaggaggtggaggaggaggaggaagatcaggaggaggaggaagaagaggaaaaaagagaaaaagaagaaatatcacagaaaaaaaaattcttcgttgtctagactgggctttttttcccccctaaaaaatagcatattggagaattgggagaagtctctttggtttggaaaaaaaaaaaaggaatcttcagcctagatcactttcttatccggactgggatattaaatatacgacacatccaggagtttattggagcgcagactgatggcgcaaaggtacgatgagctgccccattacggcgggatggacggagtaggggttcccgcttccatgtacggagaccctcacgcgccgcggccgatccccccggttcaccacctgaaccacgggccgccgctccacgccacacagcactacggcgcgcacgccccgcaccccaatgtcatgccggccagtatgggatccgctgtcaacgacgccttgaagcgggacaaggacgcgatctatgggcacccgttgtttcctctgttagctctggtctttgagaagtgcgagctggcgacctgcactccccgggaacctggagtggctggcggagacgtctgctcctccgactccttcaacgaggacatcgcggtcttcgccaagcaggttcgcgccgaaaagccacttttttcctcaaatccagagctggacaatttgatgatacaagcaatacaagtactaaggtttcatcttttggagttagaaaaggtccacgaactgtgcgataacttctgccaccgatacattagctgtttgaaggggaaaatgcccatcgacctcgtcattgatgaaagagacggcagctccaagtcagatcatgaagaactttcaggctcctccacaaatctcgctgaccataacccttcttcttggcgagaccacgatgatgcaacctcaacccactcagcaggcaccccagggccctccagtgggggccatgcttcccagagcggagacaacagcagtgagcaaggggatggtttagacaacagtgtagcttcacctggtacaggtgacgatgatgatccggataaggacaaaaaacgccagaagaaaagaggcattttccccaaagtagcaacaaatatcatgagagcatggctcttccagcatctcacacatccgtacccttccgaagagcagaagaaacagttagcgcaagacacaggacttacaattctccaagtaaacaactggtttattaatgccagaagaagaatagtacagcccatgattgaccagtcaaatcgagcaggttttcttcttgatccttcagtgagccaaggagcagcatatagtccagagggtcagcccatggggagctttgtgttggatggtcagcaacacatggggatccggcctgcaggtttgcagagcatgccaggggactacgtttctcagggtggtcctatgggaatgagtatggcacagccaagttacactcctccccagatgaccccacaccctactcaattaagacatggacccccaatgcattcatatttgccaagccatccccaccacccagccatgatgatgcacggaggaccccctacccaccctggaatgactatgtcagcacagagccccacaatgttaaattctgtagatcccaatgttggcggacaggttatggacattcatgcccaatagtataagggaactcaagggaaaaggaaacacacgcaaaaactattttaagactttctgaactttgaccagatgttgacacttaatatgaaattccagacagctgtgattattttttacttttgtcatttttcatcaagcaacagaggaccaatgcaacaagaacacaaatgtgaaatcatgggctgactgagacaattctgtccatgtaaagatcctctggaaaaagactccgagagttataactactgtagtataaatataggaactaagttaaacttgtacatttctgttgatcacgccgttatgttgcctcaaatagttttagaagagaaaaaaaaatatatccttgttttccacactatgtgtgttgttcccaaaagaatgactgttttggttcatcagtgaattcaccatccaggagagactgtggtatatattttaaacctgttgggccaatgagaaaagaaccacactggagatcatgatgaacttttggctgaacctcatcactcgaactccagcttcaagaatgtgttttcatgcccggcctttgttcctccataaatgtgtcctttagtttcaaacagatctttatagttcgtgcttcataagccaattcttattattatttttgggggactcttcttcaaagagcttgccaatgaagatttaaagacagagcaggagcttcttccaggagttctgagccttggttgtggacaaaacaatcttaagttgggcagctttcctcaacacaaaaaaaagttattaatggtcattgaaccataactaggactttatcagaaactcaaagcttgggggataaaaaggagcaagagaatactgtaacaaacttcgtacagagttcggtctattaattgtttcatgttagatattctatgtgtttacctcaattgaaaaaaaaaagaatgtttttgctagtatcagatctgctgtggaattggtattgtatgtccatgaattcttcttttctcagcacgtgttcctcactagaagaaaatgctgttacctttaagctttgtcaaatttacattaaaatacttgtatgaggactgtgacgttatgttaaaaaaaaaaaggtgttaagtcacaaaaagcggtaataaatatttcatttttgattttttgttaaaaaaaaaaaaaaaaaa

SEQ ID NO: 49 - DNA, 3256 bp, Homo sapiens
tttaaagagagaggatcgtattatagataccgcgggggcaaagctaaaaaaggggggaggggggaggaaaaaattcaagaagcagaaacccctcgcggagttttactggaagaaaaaaacgggtctgaaagattcctcctcttcatcatcatcaaccatcattcattcactaccttgacattccgggctttgattgacagctggagtggcaaaaagccatgaaacacgacagttcggttacatgtgggctgctgacgggccgctcgtaaccttcagttcgggggcttgacaatttttttcttctttttcttctttttcttttctttctttttttttccaactgaggggaagagaagagaaagagggggaaaggaggaccgaagaggaggaggaggggaggggggaggaggaggaggtggaggaggaggaggaagatcaggaggaggaggaagaagaggaaaaaagagaaaaagaagaaatatcacagaaaaaaaaattcttcgttgtctagactgggctttttttcccccctaaaaaatagcatattggagaattgggagaagtctctttggtttggaaaaaaaaaaaaggaatcttcagcctagatcactttcttatccggactgggatattaaatatacgacacatccaggagtttattggagcgcagactgatggcgcaaaggtacgatgagctgccccattacggcgggatggacggagtaggggttcccgcttccatgtacggagaccctcacgcgccgcggccgatccccccggttcaccacctgaaccacgggccgccgctccacgccacacagcactacggcgcgcacgccccgcaccccaatgtcatgccggccagtatgggatccgctgtcaacgacgccttgaagcgggacaaggacgcgatctatgggcacccgttgtttcctctgttagctctggtctttgagaagtgcgagctggcgacctgcactccccgggaacctggagtggctggcggagacgtctgctcctccgactccttcaacgaggacatcgcggtcttcgccaagcaggttcgcgccgaaaagccacttttttcctcaaatccagagctggacaatttgatgatacaagcaatacaagtactaaggtttcatcttttggagttagaaaaggtccacgaactgtgcgataacttctgccaccgatacattagctgtttgaaggggaaaatgcccatcgacctcgtcattgatgaaagagacggcagctccaagtcagatcatgaagaactttcaggctcctccacaaatctcgctgaccataacccttcttcttggcgagaccacgatgatgcaacctcaacccactcagcaggcaccccagggccctccagtgggggccatgcttcccagagcggagacaacagcagtgagcaaggggatggtttagacaacagtgtagcttcacctggtacaggtgacgatgatgatccggataaggacaaaaaacgccagaagaaaagaggcattttccccaaagtagcaacaaatatcatgagagcatggctcttccagcatctcacacatccgtacccttccgaagagcagaagaaacagttagcgcaagacacaggacttacaattctccaagtaaacaactggtttattaatgccagaagaagaatagtacagcccatgattgaccagtcaaatcgagcagtgagccaaggagcagcatatagtccagagggtcagcccatggggagctttgtgttggatggtcagcaacacatggggatccggcctgcaggtttgcagagcatgccaggggactacgtttctcagggtggtcctatgggaatgagtatggcacagccaagttacactcctccccagatgaccccacaccctactcaattaagacatggacccccaatgcattcatatttgccaagccatccccaccacccagccatgatgatgcacggaggaccccctacccaccctggaatgactatgtcagcacagagccccacaatgttaaattctgtagatcccaatgttggcggacaggttatggacattcatgcccaatagtataagggaactcaagggaaaaggaaacacacgcaaaaactattttaagactttctgaactttgaccagatgttgacacttaatatgaaattccagacagctgtgattattttttacttttgtcatttttcatcaagcaacagaggaccaatgcaacaagaacacaaatgtgaaatcatgggctgactgagacaattctgtccatgtaaagatcctctggaaaaagactccgagagttataactactgtagtataaatataggaactaagttaaacttgtacatttctgttgatcacgccgttatgttgcctcaaatagttttagaagagaaaaaaaaatatatccttgttttccacactatgtgtgttgttcccaaaagaatgactgttttggttcatcagtgaattcaccatccaggagagactgtggtatatattttaaacctgttgggccaatgagaaaagaaccacactggagatcatgatgaacttttggctgaacctcatcactcgaactccagcttcaagaatgtgttttcatgcccggcctttgttcctccataaatgtgtcctttagtttcaaacagatctttatagttcgtgcttcataagccaattcttattattatttttgggggactcttcttcaaagagcttgccaatgaagatttaaagacagagcaggagcttcttccaggagttctgagccttggttgtggacaaaacaatcttaagttgggcagctttcctcaacacaaaaaaaagttattaatggtcattgaaccataactaggactttatcagaaactcaaagcttgggggataaaaaggagcaagagaatactgtaacaaacttcgtacagagttcggtctattaattgtttcatgttagatattctatgtgtttacctcaattgaaaaaaaaaagaatgtttttgctagtatcagatctgctgtggaattggtattgtatgtccatgaattcttcttttctcagcacgtgttcctcactagaagaaaatgctgttacctttaagctttgtcaaatttacattaaaatacttgtatgaggactgtgacgttatgttaaaaaaaaaaaggtgttaagtcacaaaaagcggtaataaatatttcatttttgattttttgttaaaaaaaaaaaaaaaaaa

SEQ ID NO: 50 - DNA, 3373 bp, Homo sapiens
tttaaagagagaggatcgtattatagataccgcgggggcaaagctaaaaaaggggggaggggggaggaaaaaattcaagaagcagaaacccctcgcggagttttactggaagaaaaaaacgggtctgaaagattcctcctcttcatcatcatcaaccatcattcattcactaccttgacattccgggctttgattgacagctggagtggcaaaaagccatgaaacacgacagttcggttacatgtgggctgctgacgggccgctcgtaaccttcagttcgggggcttgacaatttttttcttctttttcttctttttcttttctttctttttttttccaactgaggggaagagaagagaaagagggggaaaggaggaccgaagaggaggaggaggggaggggggaggaggaggaggtggaggaggaggaggaagatcaggaggaggaggaagaagaggaaaaaagagaaaaagaagaaatatcacagaaaaaaaaattcttcgttgtctagactgggctttttttcccccctaaaaaatagcatattggagaattgggagaagtctctttggtttggaaaaaaaaaaaaggaatcttcagcctagatcactttcttatccggactgggatattaaatatacgacacatccaggagtttattggagcgcagactgatggcgcaaaggtacgatgagctgccccattacggcgggatggacggagtaggggttcccgcttccatgtacggagaccctcacgcgccgcggccgatccccccggttcaccacctgaaccacgggccgccgctccacgccacacagcactacggcgcgcacgccccgcaccccaatgtcatgccggccagtatgggatccgctgtcaacgacgccttgaagcgggacaaggacgcgatctatgggcacccgttgtttcctctgttagctctggtctttgagaagtgcgagctggcgacctgcactccccgggaacctggagtggctggcggagacgtctgctcctccgactccttcaacgaggacatcgcggtcttcgccaagcaggttcgcgccgaaaagccacttttttcctcaaatccagagctggacaatttgatgatacaagcaatacaagtactaaggtttcatcttttggagttagaaaaggtccacgaactgtgcgataacttctgccaccgatacattagctgtttgaaggggaaaatgcccatcgacctcgtcattgatgaaagagacggcagctccaagtcagatcatgaagaactttcaggctcctccacaaatctcgctgaccataacccttcttcttggcgagaccacgatgatgcaacctcaacccactcagcaggcaccccagggccctccagtgggggccatgcttcccagagcggagacaacagcagtgagcaaggggatggtttagacaacagtgtagcttcacctggtacaggtgacgatgatgatccggataaggacaaaaaacgccagaagaaaagaggcattttccccaaagtagcaacaaatatcatgagagcatggctcttccagcatctcacacatccgtacccttccgaagagcagaagaaacagttagcgcaagacacaggacttacaattctccaagtaaacaactggtttattaatgccagaagaagaatagtacagcccatgattgaccagtcaaatcgagcaggttttcttcttgatccttcagtgagccaaggagcagcatatagtccagagggtcagcccatggggagctttgtgttggatggtcagcaacacatggggatccggcctgcaggacctatgagtggaatgggcatgaatatgggcatggatgggcaatggcactacatgtaaccttcatcatgtaaagcaatcgcaaagcaagggggaagtttgcagagcatgccaggggactacgtttctcagggtggtcctatgggaatgagtatggcacagccaagttacactcctccccagatgaccccacaccctactcaattaagacatggacccccaatgcattcatatttgccaagccatccccaccacccagccatgatgatgcacggaggaccccctacccaccctggaatgactatgtcagcacagagccccacaatgttaaattctgtagatcccaatgttggcggacaggttatggacattcatgcccaatagtataagggaactcaagggaaaaggaaacacacgcaaaaactattttaagactttctgaactttgaccagatgttgacacttaatatgaaattccagacagctgtgattattttttacttttgtcatttttcatcaagcaacagaggaccaatgcaacaagaacacaaatgtgaaatcatgggctgactgagacaattctgtccatgtaaagatcctctggaaaaagactccgagagttataactactgtagtataaatataggaactaagttaaacttgtacatttctgttgatcacgccgttatgttgcctcaaatagttttagaagagaaaaaaaaatatatccttgttttccacactatgtgtgttgttcccaaaagaatgactgttttggttcatcagtgaattcaccatccaggagagactgtggtatatattttaaacctgttgggccaatgagaaaagaaccacactggagatcatgatgaacttttggctgaacctcatcactcgaactccagcttcaagaatgtgttttcatgcccggcctttgttcctccataaatgtgtcctttagtttcaaacagatctttatagttcgtgcttcataagccaattcttattattatttttgggggactcttcttcaaagagcttgccaatgaagatttaaagacagagcaggagcttcttccaggagttctgagccttggttgtggacaaaacaatcttaagttgggcagctttcctcaacacaaaaaaaagttattaatggtcattgaaccataactaggactttatcagaaactcaaagcttgggggataaaaaggagcaagagaatactgtaacaaacttcgtacagagttcggtctattaattgtttcatgttagatattctatgtgtttacctcaattgaaaaaaaaaagaatgtttttgctagtatcagatctgctgtggaattggtattgtatgtccatgaattcttcttttctcagcacgtgttcctcactagaagaaaatgctgttacctttaagctttgtcaaatttacattaaaatacttgtatgaggactgtgacgttatgttaaaaaaaaaaaggtgttaagtcacaaaaagcggtaataaatatttcatttttgattttttgttaaaaaaaaaaaaaaaaaa

SEQ ID NO: 51 - DNA, 2849 bp, Homo sapiens
tcctcctcctctcttctctcttacctccctccctctctctcatctttatcccttcctctcttttctgttcgccctcttctccctgctctttttccctttccacccccctcctctgttctccctcacctcctgcgccccctcccccttcccgggttctgacagtacgatgagctgccccattacggcgggatggacggagtaggggttcccgcttccatgtacggagaccctcacgcgccgcggccgatccccccggttcaccacctgaaccacgggccgccgctccacgccacacagcactacggcgcgcacgccccgcaccccaatgtcatgccggccagtatgggatccgctgtcaacgacgccttgaagcgggacaaggacgcgatctatgggcacccgttgtttcctctgttagctctggtctttgagaagtgcgagctggcgacctgcactccccgggaacctggagtggctggcggagacgtctgctcctccgactccttcaacgaggacatcgcggtcttcgccaagcaggttcgcgccgaaaagccacttttttcctcaaatccagagctggacaatttgatgatacaagcaatacaagtactaaggtttcatcttttggagttagaaaaggtccacgaactgtgcgataacttctgccaccgatacattagctgtttgaaggggaaaatgcccatcgacctcgtcattgatgaaagagacggcagctccaagtcagatcatgaagaactttcaggctcctccacaaatctcgctgaccataacccttcttcttggcgagaccacgatgatgcaacctcaacccactcagcaggcaccccagggccctccagtgggggccatgcttcccagagcggagacaacagcagtgagcaaggggatggtttagacaacagtgtagcttcacctggtacaggtgacgatgatgatccggataaggacaaaaaacgccagaagaaaagaggcattttccccaaagtagcaacaaatatcatgagagcatggctcttccagcatctcacacatccgtacccttccgaagagcagaagaaacagttagcgcaagacacaggacttacaattctccaagtaaacaactggtttattaatgccagaagaagaatagtacagcccatgattgaccagtcaaatcgagcaggttttcttcttgatccttcagtgagccaaggagcagcatatagtccagagggtcagcccatggggagctttgtgttggatggtcagcaacacatggggatccggcctgcaggacctatgagtggaatgggcatgaatatgggcatggatgggcaatggcactacatgtaaccttcatcatgtaaagcaatcgcaaagcaagggggaagtttgcagagcatgccaggggactacgtttctcagggtggtcctatgggaatgagtatggcacagccaagttacactcctccccagatgaccccacaccctactcaattaagacatggacccccaatgcattcatatttgccaagccatccccaccacccagccatgatgatgcacggaggaccccctacccaccctggaatgactatgtcagcacagagccccacaatgttaaattctgtagatcccaatgttggcggacaggttatggacattcatgcccaatagtataagggaactcaagggaaaaggaaacacacgcaaaaactattttaagactttctgaactttgaccagatgttgacacttaatatgaaattccagacagctgtgattattttttacttttgtcatttttcatcaagcaacagaggaccaatgcaacaagaacacaaatgtgaaatcatgggctgactgagacaattctgtccatgtaaagatcctctggaaaaagactccgagagttataactactgtagtataaatataggaactaagttaaacttgtacatttctgttgatcacgccgttatgttgcctcaaatagttttagaagagaaaaaaaaatatatccttgttttccacactatgtgtgttgttcccaaaagaatgactgttttggttcatcagtgaattcaccatccaggagagactgtggtatatattttaaacctgttgggccaatgagaaaagaaccacactggagatcatgatgaacttttggctgaacctcatcactcgaactccagcttcaagaatgtgttttcatgcccggcctttgttcctccataaatgtgtcctttagtttcaaacagatctttatagttcgtgcttcataagccaattcttattattatttttgggggactcttcttcaaagagcttgccaatgaagatttaaagacagagcaggagcttcttccaggagttctgagccttggttgtggacaaaacaatcttaagttgggcagctttcctcaacacaaaaaaaagttattaatggtcattgaaccataactaggactttatcagaaactcaaagcttgggggataaaaaggagcaagagaatactgtaacaaacttcgtacagagttcggtctattaattgtttcatgttagatattctatgtgtttacctcaattgaaaaaaaaaagaatgtttttgctagtatcagatctgctgtggaattggtattgtatgtccatgaattcttcttttctcagcacgtgttcctcactagaagaaaatgctgttacctttaagctttgtcaaatttacattaaaatacttgtatgaggactgtgacgttatgttaaaaaaaaaaaggtgttaagtcacaaaaagcggtaataaatatttcatttttgattttttgttaaaaaaaaaaaaaaaaaa

SEQ ID NO: 52 - skipped

SEQ ID NO: 53 - protein, 470 aa, Homo sapiens
MAQRYDELPHYGGMDGVGVPASMYGDPHAPRPIPPVHHLNHGPPLHATQHYGAHAPHPNVMPASMGSAVNDALKRDKDAIYGHPLFPLLALVFEKCELATCTPREPGVAGGDVCSSDSFNEDIAVFAKQVRAEKPLFSSNPELDNLMIQAIQVLRFHLLELEKVHELCDNFCHRYISCLKGKMPIDLVIDERDGSSKSDHEELSGSSTNLADHNPSSWRDHDDATSTHSAGTPGPSSGGHASQSGDNSSEQGDGLDNSVASPGTGDDDDPDKDKKRQKKRGIFPKVATNIMRAWLFQHLTHPYPSEEQKKQLAQDTGLTILQVNNWFINARRRIVQPMIDQSNRAVSQGAAYSPEGQPMGSFVLDGQQHMGIRPAGLQSMPGDYVSQGGPMGMSMAQPSYTPPQMTPHPTQLRHGPPMHSYLPSHPHHPAMMMHGGPPTHPGMTMSAQSPTMLNSVDPNVGGQVMDIHAQ

SEQ ID NO: 54 - protein, 381 aa, Homo sapiens
MDGVGVPASMYGDPHAPRPIPPVHHLNHGPPLHATQHYGAHAPHPNVMPASMGSAVNDALKRDKDAIYGHPLFPLLALVFEKCELATCTPREPGVAGGDVCSSDSFNEDIAVFAKQVRAEKPLFSSNPELDNLMIQAIQVLRFHLLELEKVHELCDNFCHRYISCLKGKMPIDLVIDERDGSSKSDHEELSGSSTNLADHNPSSWRDHDDATSTHSAGTPGPSSGGHASQSGDNSSEQGDGLDNSVASPGTGDDDDPDKDKKRQKKRGIFPKVATNIMRAWLFQHLTHPYPSEEQKKQLAQDTGLTILQVNNWFINARRRIVQPMIDQSNRAVSQGAAYSPEGQPMGSFVLDGQQHMGIRPAGPMSGMGMNMGMDGQWHYM

SEQ ID NO: 55 - protein, 394 aa, Homo sapiens
MAQRYDELPHYGGMDGVGVPASMYGDPHAPRPIPPVHHLNHGPPLHATQHYGAHAPHPNVMPASMGSAVNDALKRDKDAIYGHPLFPLLALVFEKCELATCTPREPGVAGGDVCSSDSFNEDIAVFAKQVRAEKPLFSSNPELDNLMIQAIQVLRFHLLELEKVHELCDNFCHRYISCLKGKMPIDLVIDERDGSSKSDHEELSGSSTNLADHNPSSWRDHDDATSTHSAGTPGPSSGGHASQSGDNSSEQGDGLDNSVASPGTGDDDDPDKDKKRQKKRGIFPKVATNIMRAWLFQHLTHPYPSEEQKKQLAQDTGLTILQVNNWFINARRRIVQPMIDQSNRAVSQGAAYSPEGQPMGSFVLDGQQHMGIRPAGPMSGMGMNMGMDGQWHYM

SEQ ID NO: 56 - protein, 477 aa, Homo sapiens
MAQRYDELPHYGGMDGVGVPASMYGDPHAPRPIPPVHHLNHGPPLHATQHYGAHAPHPNVMPASMGSAVNDALKRDKDAIYGHPLFPLLALVFEKCELATCTPREPGVAGGDVCSSDSFNEDIAVFAKQVRAEKPLFSSNPELDNLMIQAIQVLRFHLLELEKVHELCDNFCHRYISCLKGKMPIDLVIDERDGSSKSDHEELSGSSTNLADHNPSSWRDHDDATSTHSAGTPGPSSGGHASQSGDNSSEQGDGLDNSVASPGTGDDDDPDKDKKRQKKRGIFPKVATNIMRAWLFQHLTHPYPSEEQKKQLAQDTGLTILQVNNWFINARRRIVQPMIDQSNRAGFLLDPSVSQGAAYSPEGQPMGSFVLDGQQHMGIRPAGLQSMPGDYVSQGGPMGMSMAQPSYTPPQMTPHPTQLRHGPPMHSYLPSHPHHPAMMMHGGPPTHPGMTMSAQSPTMLNSVDPNVGGQVMDIHAQ

SEQ ID NO: 57 - protein, 470 aa, Homo sapiens; identical to SEQ ID NO: 53

SEQ ID NO: 58 - protein, 401 aa, Homo sapiens
MAQRYDELPHYGGMDGVGVPASMYGDPHAPRPIPPVHHLNHGPPLHATQHYGAHAPHPNVMPASMGSAVNDALKRDKDAIYGHPLFPLLALVFEKCELATCTPREPGVAGGDVCSSDSFNEDIAVFAKQVRAEKPLFSSNPELDNLMIQAIQVLRFHLLELEKVHELCDNFCHRYISCLKGKMPIDLVIDERDGSSKSDHEELSGSSTNLADHNPSSWRDHDDATSTHSAGTPGPSSGGHASQSGDNSSEQGDGLDNSVASPGTGDDDDPDKDKKRQKKRGIFPKVATNIMRAWLFQHLTHPYPSEEQKKQLAQDTGLTILQVNNWFINARRRIVQPMIDQSNRAGFLLDPSVSQGAAYSPEGQPMGSFVLDGQQHMGIRPAGPMSGMGMNMGMDGQWHYM

SEQ ID NO: 59 - protein, 388 aa, Homo sapiens
MDGVGVPASMYGDPHAPRPIPPVHHLNHGPPLHATQHYGAHAPHPNVMPASMGSAVNDALKRDKDAIYGHPLFPLLALVFEKCELATCTPREPGVAGGDVCSSDSFNEDIAVFAKQVRAEKPLFSSNPELDNLMIQAIQVLRFHLLELEKVHELCDNFCHRYISCLKGKMPIDLVIDERDGSSKSDHEELSGSSTNLADHNPSSWRDHDDATSTHSAGTPGPSSGGHASQSGDNSSEQGDGLDNSVASPGTGDDDDPDKDKKRQKKRGIFPKVATNIMRAWLFQHLTHPYPSEEQKKQLAQDTGLTILQVNNWFINARRRIVQPMIDQSNRAGFLLDPSVSQGAAYSPEGQPMGSFVLDGQQHMGIRPAGPMSGMGMNMGMDGQWHYM

SEQ ID NO: 60 - protein, 306 aa, Homo sapiens
MALVFEKCELATCTPREPGVAGGDVCSSDSFNEDIAVFAKQVRAEKPLFSSNPELDNLMIQAIQVLRFHLLELEKVHELCDNFCHRYISCLKGKMPIDLVIDERDGSSKSDHEELSGSSTNLADHNPSSWRDHDDATSTHSAGTPGPSSGGHASQSGDNSSEQGDGLDNSVASPGTGDDDDPDKDKKRQKKRGIFPKVATNIMRAWLFQHLTHPYPSEEQKKQLAQDTGLTILQVNNWFINARRRIVQPMIDQSNRAVSQGAAYSPEGQPMGSFVLDGQQHMGIRPAGPMSGMGMNMGMDGQWHYM

SEQ ID NO: 61 - DNA, 20 bp, Artificial Sequence
  MEIS2_forward primer
tcaaatccagagctggacaa

SEQ ID NO: 62 - DNA, 23 bp, Artificial Sequence
  MEIS2_reverse primer
cccttcaaacagctaatgtatcg

SEQ ID NO: 63 - DNA, 22 bp, Artificial Sequence
  MEIS2 probe
aaaggtccacgaactgtgcgat

SEQ ID NO: 64 - DNA, 3930 bp, Homo sapiens
agaggcagtataaaagcactgggtttctccccaactgcttgtcacaccgacctgcaccatctctcgcctgcctgtggggtttctgtcaactagtcgtggagggaaggagactctttaaagaataacatcttattgtggccatgccagaacccactaagaaagaggaaaatgaagtgccagccccagccccacccccggaagaaccaagtaaagagaaggaggccggaactacaccagcaaaagactggacccttgtcgaaactcctcctggggaggaacaagccaagcagaatgccaactcccagctgtccatcttgttcattgaaaaacctcaaggaggaacagtgaaagttggtgaagatatcaccttcatagccaaagtcaaggctgaagatcttctgagaaaacccactatcaaatggttcaaaggaaaatggatggacctggccagcaaagccgggaagcaccttcagctgaaggaaacctttgagaggcacagtcgggtgtacacatttgagatgcagatcatcaaggccaaagataactttgcaggaaattacagatgcgaggtcacctataaggataagtttgacagctgttcatttgatcttgaagtgcacgaatctactgggactactccaaacattgacatcagatctgctttcaagagaagtggagaaggtcaagaggatgcaggagaacttgactttagtggtctcctgaaacgtagggaggtgaagcagcaggaggaagaaccccaggtggacgtatgggagttgctgaagaacgcgaaacccagtgagtacgagaagatcgccttccagtatggaatcaccgacctgcgcggcatgctcaagcgactcaagcgcatgcgcagagaggagaagaagagcgcagcttttgcaaaaattcttgatcctgcatatcaggttgacaaaggaggcagagtgaggtttgttgtggagctggcagatccaaagttggaggtgaaatggtataaaaatggtcaagaaattcgacccagtaccaaatacatctttgaacacaaaggatgccagagaatcctgtttatcaataactgtcagatgacagatgattcagagtattatgtgacagccggtgatgagaaatgttccactgagctcttcgtaagagagcctccaattatggtgaccaaacagctggaagatacaactgcttattgtggggagagagtggaattagaatgtgaggtgtctgaagatgatgccaatgtaaaatggtttaagaatggtgaagagattatccctggtccaaaatcaagataccgaattagagttgagggtaaaaaacacatcttgatcatagagggagcaacaaaggctgatgctgcagaatattcagtaatgacaacaggaggacaatcatctgctaaacttagtgttgacttgaaacctctgaagattttgacacctctgactgatcagactgtaaatcttggaaaagaaatctgcctgaagtgtgaaatctctgaaaacataccaggaaaatggactaaaaatggcctacctgttcaggagagtgaccgtctaaaggtggttcacaagggaaggatccacaagttagtgatagccaatgccctcactgaagatgaaggtgattatgtatttgcacctgatgcctacaatgttactctgcctgccaaagttcatgttattgatcctcctaagatcatcctggatggtcttgatgctgacaacacagtgacagtgattgcaggaaacaagcttcgtcttgagatccccatcagcggagaaccacctcctaaagccatgtggagccggggagataaggctattatggaaggcagtggccggataagaacagaatcttaccctgatagcagcactctggtcattgatatagctgaaagagatgactctggtgtttaccacatcaatctgaaaaacgaagctggagaggcacatgcaagcatcaaggttaaagttgtggacttccctgatcctccagtggcaccgactgtgacagaggtgggagatgactggtgtatcatgaactgggagcctcctgcctacgacggaggctctccaatcctaggatattttattgagaggaagaagaaacaaagctccaggtggatgaggctgaattttgatctctgcaaagaaacaacttttgagcccaagaagatgattgaaggtgtggcctatgaggtccgcatctttgcagtcaatgccattggcatctccaagcccagtatgccctccaggccttttgttcctttggctgtaacaagccctcctactcttctgactgtggactctgtcactgacacgactgtcacgatgaggtggcgccccccagaccacattggtgcagcaggtttagatggctatgtgctagagtattgctttgaaggaagtacatcagcaaaacagtctgatgaaaatggggaggctgcctatgatctgccagctgaggactggatagttgcaaacaaagatctgattgacaagacgaagttcaccatcacaggtctgccaacagatgcaaagatctttgtgcgtgtgaaggctgttaatgcagctggtgccagcgagcccaagtactattctcagcccattctcgtgaaggaaatcatagaacctccaaagattcgcattccaagacacctgaagcaaacctatatccgcagagttggagaagctgtcaatctggttatacctttccagggaaaaccaagaccagaattaacttggaagaaggatggtgcagaaattgataagaatcaaataaacattcgcaactctgagactgatacaatcatatttattagaaaagcagagaggagccactctgggaaatatgatctgcaagtcaaagtggacaaattcgtggagaccgcatcaattgacatccagatcattgaccgtccaggtccaccccaaattgtgaagattgaggatgtctggggagaaaatgtcgctctcacatggactccaccaaaggatgatggaaatgctgctatcacaggctataccattcagaaggctgacaagaagagcatggaatggtttactgtcattgagcattatcatcgaaccagtgccaccattactgaattggtcatagggaatgaatattacttccgggtcttttctgaaaacatgtgtggcctcagtgaggatgccaccatgactaaagagagtgcagtgatcgccagggatggtaaaatctacaaaaatccagtgtatgaagactttgatttctcagaggcacccatgtttactcagcctttggttaacacctatgccatagctggttacaatgccaccctaaactgcagtgtgagaggaaatcctaagcctaaaataacctggatgaaaaacaaagttgctattgtggatgatccaagatacaggatgttcagcaaccagggagtctgtaccctggaaattcgcaagcccagcccctatgatggaggcacttactgctgcaaagcagtcaatgaccttgggacagtggagattgaatgcaaactggaggtgaaagtgatatatcaaggagtaaatacccctggacaaccagtcttcctggaggggcagcaacaggtgggctctccttctgcagactcctcttgcaaggcgtacctccaaacataattgattcgtatctgcgagacttacactcaagcaatcctgaggaatactgagggagggcctggctactgtctctctgcactctgctgctttgaaatctggttgaaatgagaaaaagcattttctgttttcccaccaggcccccaagtgtggtctttttctttcctcctaatgttgaagagaaaaaaaaaaaaaaaagtttgcccagattgcttaattaaaaattgcaaacaaaatctcatttgaagtcaaaaaaaaaaaaaaaaaaaaa

SEQ ID NO: 65 - DNA, 3919 bp, Homo sapiens
agaggcagtataaaagcactgggtttctccccaactgcttgtcacaccgacctgcaccatctctcgcctgcctgtggggtttctgtcaactagtcgtggagggaaggagactctttaaagaataacatcttattgtggccatgccagaacccactaagaaagaggaaaatgaagtgccagccccagccccacccccggaagaaccaagtaaagagaaggaggccggaactacaccagcaaaagactggacccttgtcgaaactcctcctggggaggaacaagccaagcagaatgccaactcccagctgtccatcttgttcattgaaaaacctcaaggaggaacagtgaaagttggtgaagatatcaccttcatagccaaagtcaaggctgaagatcttctgagaaaacccactatcaaatggttcaaaggaaaatggatggacctggccagcaaagccgggaagcaccttcagctgaaggaaacctttgagaggcacagtcgggtgtacacatttgagatgcagatcatcaaggccaaagataactttgcaggaaattacagatgcgaggtcacctataaggataagtttgacagctgttcatttgatcttgaagtgcacgaatctactgggactactccaaacattgacatcagatctgctttcaagagaagtggagaaggtcaagaggatgcaggagaacttgactttagtggtctcctgaaacgtagggaggtgaagcagcaggaggaagaaccccaggtggacgtatgggagttgctgaagaacgcgaaacccagtgagtacgagaagatcgccttccagtatggaatcaccgacctgcgcggcatgctcaagcgactcaagcgcatgcgcagagaggagaagaagagcgcagcttttgcaaaaattcttgatcctgcatatcaggttgacaaaggaggcagagtgaggtttgttgtggagctggcagatccaaagttggaggtgaaatggtataaaaatggtcaagaaattcgacccagtaccaaatacatctttgaacacaaaggatgccagagaatcctgtttatcaataactgtcagatgacagatgattcagagtattatgtgacagccggtgatgagaaatgttccactgagctcttcgtaagagagcctccaattatggtgaccaaacagctggaagatacaactgcttattgtggggagagagtggaattagaatgtgaggtgtctgaagatgatgccaatgtaaaatggtttaagaatggtgaagagattatccctggtccaaaatcaagataccgaattagagttgagggtaaaaaacacatcttgatcatagagggagcaacaaaggctgatgctgcagaatattcagtaatgacaacaggaggacaatcatctgctaaacttagtgttgacttgaaacctctgaagattttgacacctctgactgatcagactgtaaatcttggaaaagaaatctgcctgaagtgtgaaatctctgaaaacataccaggaaaatggactaaaaatggcctacctgttcaggagagtgaccgtctaaaggtggttcacaagggaaggatccacaagttagtgatagccaatgccctcactgaagatgaaggtgattatgtatttgcacctgatgcctacaatgttactctgcctgccaaagttcatgttattgatcctcctaagatcatcctggatggtcttgatgctgacaacacagtgacagtgattgcaggaaacaagcttcgtcttgagatccccatcagcggagaaccacctcctaaagccatgtggagccggggagataaggctattatggaaggcagtggccggataagaacagaatcttaccctgatagcagcactctggtcattgatatagctgaaagagatgactctggtgtttaccacatcaatctgaaaaacgaagctggagaggcacatgcaagcatcaaggttaaagttgtggacttccctgatcctccagtggcaccgactgtgacagaggtgggagatgactggtgtatcatgaactgggagcctcctgcctacgacggaggctctccaatcctaggatattttattgagaggaagaagaaacaaagctccaggtggatgaggctgaattttgatctctgcaaagaaacaacttttgagcccaagaagatgattgaaggtgtggcctatgaggtccgcatctttgcagtcaatgccattggcatctccaagcccagtatgccctccaggccttttgttcctttggctgtaacaagccctcctactcttctgactgtggactctgtcactgacacgactgtcacgatgaggtggcgccccccagaccacattggtgcagcaggtttagatggctatgtgctagagtattgctttgaaggaactgaggactggatagttgcaaacaaagatctgattgacaagacgaagttcaccatcacaggtctgccaacagatgcaaagatctttgtgcgtgtgaaggctgttaatgcagctggtgccagcgagcccaagtactattctcagcccattctcgtgaaggaaatcatagaacctccaaagattcgcattccaagacacctgaagcaaacctatatccgcagagttggagaagctgtcaatctggttatacctttccagggaaaaccaagaccagaattaacttggaagaaggatggtgcagaaattgataagaatcaaataaacattcgcaactctgagactgatacaatcatatttattagaaaagcagagaggagccactctgggaaatatgatctgcaagtcaaagtggacaaattcgtggagaccgcatcaattgacatccagatcattgaccgtccaggtccaccccaaattgtgaagattgaggatgtctggggagaaaatgtcgctctcacatggactccaccaaaggatgatggaaatgctgctatcacaggctataccattcagaaggctgacaagaagagcatggaatggtttactgtcattgagcattatcatcgaaccagtgccaccattactgaattggtcatagggaatgaatattacttccgggtcttttctgaaaacatgtgtggcctcagtgaggatgccaccatgactaaagagagtgcagtgatcgccagggatggtaaaatctacaaaaatccagtgtatgaagactttgatttctcagaggcacccatgtttactcagcctttggttaacacctatgccatagctggttacaatgccaccctaaactgcagtgtgagaggaaatcctaagcctaaaataacctggatgaaaaacaaagttgctattgtggatgatccaagatacaggatgttcagcaaccagggagtctgtaccctggaaattcgcaagcccagcccctatgatggaggcacttactgctgcaaagcagtcaatgaccttgggacagtggagattgaatgcaaactggaggtgaaagtgatatatcaaggagtaaatacccctggacaaccagtcttcctggaggggcagcaacagtcattgcacaataaggatttttgaatgtataatatcatctaaggtgggctctccttctgcagactcctcttgcaaggcgtacctccaaacataattgattcgtatctgcgagacttacactcaagcaatcctgaggaatactgagggagggcctggctactgtctctctgcactctgctgctttgaaatctggttgaaatgagaaaaagcattttctgttttcccaccaggcccccaagtgtggtctttttctttcctcctaatgttgaagagaaaaaaaaaaaaaaaagtttgcccagattgcttaattaaaaattgcaaacaaaatctcatttgaagtcaaaaaaaaaaaaaaaaaaaaa

SEQ ID NO: 66 - DNA, 3883 bp, Homo sapiens
agaggcagtataaaagcactgggtttctccccaactgcttgtcacaccgacctgcaccatctctcgcctgcctgtggggtttctgtcaactagtcgtggagggaaggagactctttaaagaataacatcttattgtggccatgccagaacccactaagaaagaggaaccaagtaaagagaaggaggccggaactacaccagcaaaagactggacccttgtcgaaactcctcctggggaggaacaagccaagcagaatgccaactcccagctgtccatcttgttcattgaaaaacctcaaggaggaacagtgaaagttggtgaagatatcaccttcatagccaaagtcaaggctgaagatcttctgagaaaacccactatcaaatggttcaaaggaaaatggatggacctggccagcaaagccgggaagcaccttcagctgaaggaaacctttgagaggcacagtcgggtgtacacatttgagatgcagatcatcaaggccaaagataactttgcaggaaattacagatgcgaggtcacctataaggataagtttgacagctgttcatttgatcttgaagtgcacgaatctactgggactactccaaacattgacatcagatctgctttcaagagaagtggagaaggtcaagaggatgcaggagaacttgactttagtggtctcctgaaacgtagggaggtgaagcagcaggaggaagaaccccaggtggacgtatgggagttgctgaagaacgcgaaacccagtgagtacgagaagatcgccttccagtatggaatcaccgacctgcgcggcatgctcaagcgactcaagcgcatgcgcagagaggagaagaagagcgcagcttttgcaaaaattcttgatcctgcatatcaggttgacaaaggaggcagagtgaggtttgttgtggagctggcagatccaaagttggaggtgaaatggtataaaaatggtcaagaaattcgacccagtaccaaatacatctttgaacacaaaggatgccagagaatcctgtttatcaataactgtcagatgacagatgattcagagtattatgtgacagccggtgatgagaaatgttccactgagctcttcgtaagagagcctccaattatggtgaccaaacagctggaagatacaactgcttattgtggggagagagtggaattagaatgtgaggtgtctgaagatgatgccaatgtaaaatggtttaagaatggtgaagagattatccctggtccaaaatcaagataccgaattagagttgagggtaaaaaacacatcttgatcatagagggagcaacaaaggctgatgctgcagaatattcagtaatgacaacaggaggacaatcatctgctaaacttagtgttgacttgaaacctctgaagattttgacacctctgactgatcagactgtaaatcttggaaaagaaatctgcctgaagtgtgaaatctctgaaaacataccaggaaaatggactaaaaatggcctacctgttcaggagagtgaccgtctaaaggtggttcacaagggaaggatccacaagttagtgatagccaatgccctcactgaagatgaaggtgattatgtatttgcacctgatgcctacaatgttactctgcctgccaaagttcatgttattgatcctcctaagatcatcctggatggtcttgatgctgacaacacagtgacagtgattgcaggaaacaagcttcgtcttgagatccccatcagcggagaaccacctcctaaagccatgtggagccggggagataaggctattatggaaggcagtggccggataagaacagaatcttaccctgatagcagcactctggtcattgatatagctgaaagagatgactctggtgtttaccacatcaatctgaaaaacgaagctggagaggcacatgcaagcatcaaggttaaagttgtggacttccctgatcctccagtggcaccgactgtgacagaggtgggagatgactggtgtatcatgaactgggagcctcctgcctacgacggaggctctccaatcctaggatattttattgagaggaagaagaaacaaagctccaggtggatgaggctgaattttgatctctgcaaagaaacaacttttgagcccaagaagatgattgaaggtgtggcctatgaggtccgcatctttgcagtcaatgccattggcatctccaagcccagtatgccctccaggccttttgttcctttggctgtaacaagccctcctactcttctgactgtggactctgtcactgacacgactgtcacgatgaggtggcgccccccagaccacattggtgcagcaggtttagatggctatgtgctagagtattgctttgaaggaactgaggactggatagttgcaaacaaagatctgattgacaagacgaagttcaccatcacaggtctgccaacagatgcaaagatctttgtgcgtgtgaaggctgttaatgcagctggtgccagcgagcccaagtactattctcagcccattctcgtgaaggaaatcatagaacctccaaagattcgcattccaagacacctgaagcaaacctatatccgcagagttggagaagctgtcaatctggttatacctttccagggaaaaccaagaccagaattaacttggaagaaggatggtgcagaaattgataagaatcaaataaacattcgcaactctgagactgatacaatcatatttattagaaaagcagagaggagccactctgggaaatatgatctgcaagtcaaagtggacaaattcgtggagaccgcatcaattgacatccagatcattgaccgtccaggtccaccccaaattgtgaagattgaggatgtctggggagaaaatgtcgctctcacatggactccaccaaaggatgatggaaatgctgctatcacaggctataccattcagaaggctgacaagaagagcatggaatggtttactgtcattgagcattatcatcgaaccagtgccaccattactgaattggtcatagggaatgaatattacttccgggtcttttctgaaaacatgtgtggcctcagtgaggatgccaccatgactaaagagagtgcagtgatcgccagggatggtaaaatctacaaaaatccagtgtatgaagactttgatttctcagaggcacccatgtttactcagcctttggttaacacctatgccatagctggttacaatgccaccctaaactgcagtgtgagaggaaatcctaagcctaaaataacctggatgaaaaacaaagttgctattgtggatgatccaagatacaggatgttcagcaaccagggagtctgtaccctggaaattcgcaagcccagcccctatgatggaggcacttactgctgcaaagcagtcaatgaccttgggacagtggagattgaatgcaaactggaggtgaaagtgatatatcaaggagtaaatacccctggacaaccagtcttcctggaggggcagcaacagtcattgcacaataaggatttttgaatgtataatatcatctaaggtgggctctccttctgcagactcctcttgcaaggcgtacctccaaacataattgattcgtatctgcgagacttacactcaagcaatcctgaggaatactgagggagggcctggctactgtctctctgcactctgctgctttgaaatctggttgaaatgagaaaaagcattttctgttttcccaccaggcccccaagtgtggtctttttctttcctcctaatgttgaagagaaaaaaaaaaaaaaaagtttgcccagattgcttaattaaaaattgcaaacaaaatctcatttgaagtcaaaaaaaaaaaaaaaaaaaaa

SEQ ID NO: 67 - DNA, 3862 bp, Homo sapiens
agaggcagtataaaagcactgggtttctccccaactgcttgtcacaccgacctgcaccatctctcgcctgcctgtggggtttctgtcaactagtcgtggagggaaggagactctttaaagaataacatcttattgtggccatgccagaacccactaagaaagaggaaaatgaagtgccagccccagccccacccccggaagaaccaagtaaagagaaggaggccggaactacaccagcaaaagactggacccttgtcgaaactcctcctggggaggaacaagccaagcagaatgccaactcccagctgtccatcttgttcattgaaaaacctcaaggaggaacagtgaaagttggtgaagatatcaccttcatagccaaagtcaaggctgaagatcttctgagaaaacccactatcaaatggttcaaaggaaaatggatggacctggccagcaaagccgggaagcaccttcagctgaaggaaacctttgagaggcacagtcgggtgtacacatttgagatgcagatcatcaaggccaaagataactttgcaggaaattacagatgcgaggtcacctataaggataagtttgacagctgttcatttgatcttgaagtgcacgaatctactgggactactccaaacattgacatcagatctgctttcaagagaagggaggtgaagcagcaggaggaagaaccccaggtggacgtatgggagttgctgaagaacgcgaaacccagtgagtacgagaagatcgccttccagtatggaatcaccgacctgcgcggcatgctcaagcgactcaagcgcatgcgcagagaggagaagaagagcgcagcttttgcaaaaattcttgatcctgcatatcaggttgacaaaggaggcagagtgaggtttgttgtggagctggcagatccaaagttggaggtgaaatggtataaaaatggtcaagaaattcgacccagtaccaaatacatctttgaacacaaaggatgccagagaatcctgtttatcaataactgtcagatgacagatgattcagagtattatgtgacagccggtgatgagaaatgttccactgagctcttcgtaagagagcctccaattatggtgaccaaacagctggaagatacaactgcttattgtggggagagagtggaattagaatgtgaggtgtctgaagatgatgccaatgtaaaatggtttaagaatggtgaagagattatccctggtccaaaatcaagataccgaattagagttgagggtaaaaaacacatcttgatcatagagggagcaacaaaggctgatgctgcagaatattcagtaatgacaacaggaggacaatcatctgctaaacttagtgttgacttgaaacctctgaagattttgacacctctgactgatcagactgtaaatcttggaaaagaaatctgcctgaagtgtgaaatctctgaaaacataccaggaaaatggactaaaaatggcctacctgttcaggagagtgaccgtctaaaggtggttcacaagggaaggatccacaagttagtgatagccaatgccctcactgaagatgaaggtgattatgtatttgcacctgatgcctacaatgttactctgcctgccaaagttcatgttattgatcctcctaagatcatcctggatggtcttgatgctgacaacacagtgacagtgattgcaggaaacaagcttcgtcttgagatccccatcagcggagaaccacctcctaaagccatgtggagccggggagataaggctattatggaaggcagtggccggataagaacagaatcttaccctgatagcagcactctggtcattgatatagctgaaagagatgactctggtgtttaccacatcaatctgaaaaacgaagctggagaggcacatgcaagcatcaaggttaaagttgtggacttccctgatcctccagtggcaccgactgtgacagaggtgggagatgactggtgtatcatgaactgggagcctcctgcctacgacggaggctctccaatcctaggatattttattgagaggaagaagaaacaaagctccaggtggatgaggctgaattttgatctctgcaaagaaacaacttttgagcccaagaagatgattgaaggtgtggcctatgaggtccgcatctttgcagtcaatgccattggcatctccaagcccagtatgccctccaggccttttgttcctttggctgtaacaagccctcctactcttctgactgtggactctgtcactgacacgactgtcacgatgaggtggcgccccccagaccacattggtgcagcaggtttagatggctatgtgctagagtattgctttgaaggaactgaggactggatagttgcaaacaaagatctgattgacaagacgaagttcaccatcacaggtctgccaacagatgcaaagatctttgtgcgtgtgaaggctgttaatgcagctggtgccagcgagcccaagtactattctcagcccattctcgtgaaggaaatcatagaacctccaaagattcgcattccaagacacctgaagcaaacctatatccgcagagttggagaagctgtcaatctggttatacctttccagggaaaaccaagaccagaattaacttggaagaaggatggtgcagaaattgataagaatcaaataaacattcgcaactctgagactgatacaatcatatttattagaaaagcagagaggagccactctgggaaatatgatctgcaagtcaaagtggacaaattcgtggagaccgcatcaattgacatccagatcattgaccgtccaggtccaccccaaattgtgaagattgaggatgtctggggagaaaatgtcgctctcacatggactccaccaaaggatgatggaaatgctgctatcacaggctataccattcagaaggctgacaagaagagcatggaatggtttactgtcattgagcattatcatcgaaccagtgccaccattactgaattggtcatagggaatgaatattacttccgggtcttttctgaaaacatgtgtggcctcagtgaggatgccaccatgactaaagagagtgcagtgatcgccagggatggtaaaatctacaaaaatccagtgtatgaagactttgatttctcagaggcacccatgtttactcagcctttggttaacacctatgccatagctggttacaatgccaccctaaactgcagtgtgagaggaaatcctaagcctaaaataacctggatgaaaaacaaagttgctattgtggatgatccaagatacaggatgttcagcaaccagggagtctgtaccctggaaattcgcaagcccagcccctatgatggaggcacttactgctgcaaagcagtcaatgaccttgggacagtggagattgaatgcaaactggaggtgaaagtgatatatcaaggagtaaatacccctggacaaccagtcttcctggaggggcagcaacagtcattgcacaataaggatttttgaatgtataatatcatctaaggtgggctctccttctgcagactcctcttgcaaggcgtacctccaaacataattgattcgtatctgcgagacttacactcaagcaatcctgaggaatactgagggagggcctggctactgtctctctgcactctgctgctttgaaatctggttgaaatgagaaaaagcattttctgttttcccaccaggcccccaagtgtggtctttttctttcctcctaatgttgaagagaaaaaaaaaaaaaaaagtttgcccagattgcttaattaaaaattgcaaacaaaatctcatttgaagtcaaaaaaaaaaaaaaaaaaaaa

SEQ ID NO: 68 - DNA, 3841 bp, Homo sapiens
agaggcagtataaaagcactgggtttctccccaactgcttgtcacaccgacctgcaccatctctcgcctgcctgtggggtttctgtcaactagtcgtggagggaaggagactctttaaagaataacatcttattgtggccatgccagaacccactaagaaagaggactggacccttgtcgaaactcctcctggggaggaacaagccaagcagaatgccaactcccagctgtccatcttgttcattgaaaaacctcaaggaggaacagtgaaagttggtgaagatatcaccttcatagccaaagtcaaggctgaagatcttctgagaaaacccactatcaaatggttcaaaggaaaatggatggacctggccagcaaagccgggaagcaccttcagctgaaggaaacctttgagaggcacagtcgggtgtacacatttgagatgcagatcatcaaggccaaagataactttgcaggaaattacagatgcgaggtcacctataaggataagtttgacagctgttcatttgatcttgaagtgcacgaatctactgggactactccaaacattgacatcagatctgctttcaagagaagtggagaaggtcaagaggatgcaggagaacttgactttagtggtctcctgaaacgtagggaggtgaagcagcaggaggaagaaccccaggtggacgtatgggagttgctgaagaacgcgaaacccagtgagtacgagaagatcgccttccagtatggaatcaccgacctgcgcggcatgctcaagcgactcaagcgcatgcgcagagaggagaagaagagcgcagcttttgcaaaaattcttgatcctgcatatcaggttgacaaaggaggcagagtgaggtttgttgtggagctggcagatccaaagttggaggtgaaatggtataaaaatggtcaagaaattcgacccagtaccaaatacatctttgaacacaaaggatgccagagaatcctgtttatcaataactgtcagatgacagatgattcagagtattatgtgacagccggtgatgagaaatgttccactgagctcttcgtaagagagcctccaattatggtgaccaaacagctggaagatacaactgcttattgtggggagagagtggaattagaatgtgaggtgtctgaagatgatgccaatgtaaaatggtttaagaatggtgaagagattatccctggtccaaaatcaagataccgaattagagttgagggtaaaaaacacatcttgatcatagagggagcaacaaaggctgatgctgcagaatattcagtaatgacaacaggaggacaatcatctgctaaacttagtgttgacttgaaacctctgaagattttgacacctctgactgatcagactgtaaatcttggaaaagaaatctgcctgaagtgtgaaatctctgaaaacataccaggaaaatggactaaaaatggcctacctgttcaggagagtgaccgtctaaaggtggttcacaagggaaggatccacaagttagtgatagccaatgccctcactgaagatgaaggtgattatgtatttgcacctgatgcctacaatgttactctgcctgccaaagttcatgttattgatcctcctaagatcatcctggatggtcttgatgctgacaacacagtgacagtgattgcaggaaacaagcttcgtcttgagatccccatcagcggagaaccacctcctaaagccatgtggagccggggagataaggctattatggaaggcagtggccggataagaacagaatcttaccctgatagcagcactctggtcattgatatagctgaaagagatgactctggtgtttaccacatcaatctgaaaaacgaagctggagaggcacatgcaagcatcaaggttaaagttgtggacttccctgatcctccagtggcaccgactgtgacagaggtgggagatgactggtgtatcatgaactgggagcctcctgcctacgacggaggctctccaatcctaggatattttattgagaggaagaagaaacaaagctccaggtggatgaggctgaattttgatctctgcaaagaaacaacttttgagcccaagaagatgattgaaggtgtggcctatgaggtccgcatctttgcagtcaatgccattggcatctccaagcccagtatgccctccaggccttttgttcctttggctgtaacaagccctcctactcttctgactgtggactctgtcactgacacgactgtcacgatgaggtggcgccccccagaccacattggtgcagcaggtttagatggctatgtgctagagtattgctttgaaggaactgaggactggatagttgcaaacaaagatctgattgacaagacgaagttcaccatcacaggtctgccaacagatgcaaagatctttgtgcgtgtgaaggctgttaatgcagctggtgccagcgagcccaagtactattctcagcccattctcgtgaaggaaatcatagaacctccaaagattcgcattccaagacacctgaagcaaacctatatccgcagagttggagaagctgtcaatctggttatacctttccagggaaaaccaagaccagaattaacttggaagaaggatggtgcagaaattgataagaatcaaataaacattcgcaactctgagactgatacaatcatatttattagaaaagcagagaggagccactctgggaaatatgatctgcaagtcaaagtggacaaattcgtggagaccgcatcaattgacatccagatcattgaccgtccaggtccaccccaaattgtgaagattgaggatgtctggggagaaaatgtcgctctcacatggactccaccaaaggatgatggaaatgctgctatcacaggctataccattcagaaggctgacaagaagagcatggaatggtttactgtcattgagcattatcatcgaaccagtgccaccattactgaattggtcatagggaatgaatattacttccgggtcttttctgaaaacatgtgtggcctcagtgaggatgccaccatgactaaagagagtgcagtgatcgccagggatggtaaaatctacaaaaatccagtgtatgaagactttgatttctcagaggcacccatgtttactcagcctttggttaacacctatgccatagctggttacaatgccaccctaaactgcagtgtgagaggaaatcctaagcctaaaataacctggatgaaaaacaaagttgctattgtggatgatccaagatacaggatgttcagcaaccagggagtctgtaccctggaaattcgcaagcccagcccctatgatggaggcacttactgctgcaaagcagtcaatgaccttgggacagtggagattgaatgcaaactggaggtgaaagtgatatatcaaggagtaaatacccctggacaaccagtcttcctggaggggcagcaacagtcattgcacaataaggatttttgaatgtataatatcatctaaggtgggctctccttctgcagactcctcttgcaaggcgtacctccaaacataattgattcgtatctgcgagacttacactcaagcaatcctgaggaatactgagggagggcctggctactgtctctctgcactctgctgctttgaaatctggttgaaatgagaaaaagcattttctgttttcccaccaggcccccaagtgtggtctttttctttcctcctaatgttgaagagaaaaaaaaaaaaaaaagtttgcccagattgcttaattaaaaattgcaaacaaaatctcatttgaagtcaaaaaaaaaaaaaaaaaaaaa

SEQ ID NO: 69 - DNA, 3778 bp, Homo sapiens
agaggcagtataaaagcactgggtttctccccaactgcttgtcacaccgacctgcaccatctctcgcctgcctgtggggtttctgtcaactagtcgtggagggaaggagactctttaaagaataacatcttattgtggccatgccagaacccactaagaaagaggatgaagaggaagtctccccgcctagcgccttgcctccagactggacccttgtcgaaactcctcctggggaggaacaagccaagcagaatgccaactcccagctgtccatcttgttcattgaaaaacctcaaggaggaacagtgaaagttggtgaagatatcaccttcatagccaaagtcaaggctgaagatcttctgagaaaacccactatcaaatggttcaaaggaaaatggatggacctggccagcaaagccgggaagcaccttcagctgaaggaaacctttgagaggcacagtcgggtgtacacatttgagatgcagatcatcaaggccaaagataactttgcaggaaattacagatgcgaggtcacctataaggataagtttgacagctgttcatttgatcttgaagtgcacgaatctactgggactactccaaacattgacatcagatctgctttcaagagaagtggagaaggtcaagaggatgcaggagaacttgactttagtggtctcctgaaacgtagggaggtgaagcagcaggaggaagaaccccaggtggacgtatgggagttgctgaagaacgcgaaacccagtgagtacgagaagatcgccttccagtatggaatcaccgacctgcgcggcatgctcaagcgactcaagcgcatgcgcagagaggagaagaagagcgcagcttttgcaaaaattcttgatcctgcatatcaggttgacaaaggaggcagagtgaggtttgttgtggagctggcagatccaaagttggaggtgaaatggtataaaaatggtcaagaaattcgacccagtaccaaatacatctttgaacacaaaggatgccagagaatcctgtttatcaataactgtcagatgacagatgattcagagtattatgtgacagccggtgatgagaaatgttccactgagctcttcgtaagagagcctccaattatggtgaccaaacagctggaagatacaactgcttattgtggggagagagtggaattagaatgtgaggtgtctgaagatgatgccaatgtaaaatggtttaagaatggtgaagagattatccctggtccaaaatcaagataccgaattagagttgagggtaaaaaacacatcttgatcatagagggagcaacaaaggctgatgctgcagaatattcagtaatgacaacaggaggacaatcatctgctaaacttagtgttgacttgaaacctctgaagattttgacacctctgactgatcagactgtaaatcttggaaaagaaatctgcctgaagtgtgaaatctctgaaaacataccaggaaaatggactaaaaatggcctacctgttcaggagagtgaccgtctaaaggtggttcacaagggaaggatccacaagttagtgatagccaatgccctcactgaagatgaaggtgattatgtatttgcacctgatgcctacaatgttactctgcctgccaaagttcatgttattgatcctcctaagatcatcctggatggtcttgatgctgacaacacagtgacagtgattgcaggaaacaagcttcgtcttgagatccccatcagcggagaaccacctcctaaagccatgtggagccggggagataaggctattatggaaggcagtggccggataagaacagaatcttaccctgatagcagcactctggtcattgatatagctgaaagagatgactctggtgtttaccacatcaatctgaaaaacgaagctggagaggcacatgcaagcatcaaggttaaagttgtggacttccctgatcctccagtggcaccgactgtgacagaggtgggagatgactggtgtatcatgaactgggagcctcctgcctacgacggaggctctccaatcctaggatattttattgagaggaagaagaaacaaagctccaggtggatgaggctgaattttgatctctgcaaagaaacaacttttgagcccaagaagatgattgaaggtgtggcctatgaggtccgcatctttgcagtcaatgccattggcatctccaagcccagtatgccctccaggccttttgttcctttggctgtaacaagccctcctactcttctgactgtggactctgtcactgacacgactgtcacgatgaggtggcgccccccagaccacattggtgcagcaggtttagatggctatgtgctagagtattgctttgaaggaactgaggactggatagttgcaaacaaagatctgattgacaagacgaagttcaccatcacaggtctgccaacagatgcaaagatctttgtgcgtgtgaaggctgttaatgcagctggtgccagcgagcccaagtactattctcagcccattctcgtgaaggaaatcatagaacctccaaagattcgcattccaagacacctgaagcaaacctatatccgcagagttggagaagctgtcaatctggttatacctttccagggaaaaccaagaccagaattaacttggaagaaggatggtgcagaaattgataagaatcaaataaacattcgcaactctgagactgatacaatcatatttattagaaaagcagagaggagccactctgggaaatatgatctgcaagtcaaagtggacaaattcgtggagaccgcatcaattgacatccagatcattgaccgtccaggtccaccccaaattgtgaagattgaggatgtctggggagaaaatgtcgctctcacatggactccaccaaaggatgatggaaatgctgctatcacaggctataccattcagaaggctgacaagaagagcatggaatggtttactgtcattgagcattatcatcgaaccagtgccaccattactgaattggtcatagggaatgaatattacttccgggtcttttctgaaaacatgtgtggcctcagtgaggatgccaccatgactaaagagagtgcagtgatcgccagggatggtaaaatctacaaaaatccagtgtatgaagactttgatttctcagaggcacccatgtttactcagcctttggttaacacctatgccatagctggttacaatgccaccctaaactgcagtgtgagaggaaatcctaagcctaaaataacctggatgaaaaacaaagttgctattgtggatgatccaagatacaggatgttcagcaaccagggagtctgtaccctggaaattcgcaagcccagcccctatgatggaggcacttactgctgcaaagcagtcaatgaccttgggacagtggagattgaatgcaaactggaggtgaaaggtgggctctccttctgcagactcctcttgcaaggcgtacctccaaacataattgattcgtatctgcgagacttacactcaagcaatcctgaggaatactgagggagggcctggctactgtctctctgcactctgctgctttgaaatctggttgaaatgagaaaaagcattttctgttttcccaccaggcccccaagtgtggtctttttctttcctcctaatgttgaagagaaaaaaaaaaaaaaaagtttgcccagattgcttaattaaaaattgcaaacaaaatctcatttgaagtcaaaaaaaaaaaaaaaaaaaaa

SEQ ID NO: 70 - DNA, 3994 bp, Homo sapiens
agaggcagtataaaagcactgggtttctccccaactgcttgtcacaccgacctgcaccatctctcgcctgcctgtggggtttctgtcaactagtcgtggagggaaggagactctttaaagaataacatcttattgtggccatgccagaacccactaagaaagaggaaaatgaagtgccagccccagccccacccccggaagaaccaagtaaagagaaggaggccggaactacaccagcaaaagatgaagaggaagtctccccgcctagcgccttgcctccaggtttgggtagtcgggccctggagagaaaagattcagactggacccttgtcgaaactcctcctggggaggaacaagccaagcagaatgccaactcccagctgtccatcttgttcattgaaaaacctcaaggaggaacagtgaaagttggtgaagatatcaccttcatagccaaagtcaaggctgaagatcttctgagaaaacccactatcaaatggttcaaaggaaaatggatggacctggccagcaaagccgggaagcaccttcagctgaaggaaacctttgagaggcacagtcgggtgtacacatttgagatgcagatcatcaaggccaaagataactttgcaggaaattacagatgcgaggtcacctataaggataagtttgacagctgttcatttgatcttgaagtgcacgaatctactgggactactccaaacattgacatcagatctgctttcaagagaagtggagaaggtcaagaggatgcaggagaacttgactttagtggtctcctgaaacgtagggaggtgaagcagcaggaggaagaaccccaggtggacgtatgggagttgctgaagaacgcgaaacccagtgagtacgagaagatcgccttccagtatggaatcaccgacctgcgcggcatgctcaagcgactcaagcgcatgcgcagagaggagaagaagagcgcagcttttgcaaaaattcttgatcctgcatatcaggttgacaaaggaggcagagtgaggtttgttgtggagctggcagatccaaagttggaggtgaaatggtataaaaatggtcaagaaattcgacccagtaccaaatacatctttgaacacaaaggatgccagagaatcctgtttatcaataactgtcagatgacagatgattcagagtattatgtgacagccggtgatgagaaatgttccactgagctcttcgtaagagagcctccaattatggtgaccaaacagctggaagatacaactgcttattgtggggagagagtggaattagaatgtgaggtgtctgaagatgatgccaatgtaaaatggtttaagaatggtgaagagattatccctggtccaaaatcaagataccgaattagagttgagggtaaaaaacacatcttgatcatagagggagcaacaaaggctgatgctgcagaatattcagtaatgacaacaggaggacaatcatctgctaaacttagtgttgacttgaaacctctgaagattttgacacctctgactgatcagactgtaaatcttggaaaagaaatctgcctgaagtgtgaaatctctgaaaacataccaggaaaatggactaaaaatggcctacctgttcaggagagtgaccgtctaaaggtggttcacaagggaaggatccacaagttagtgatagccaatgccctcactgaagatgaaggtgattatgtatttgcacctgatgcctacaatgttactctgcctgccaaagttcatgttattgatcctcctaagatcatcctggatggtcttgatgctgacaacacagtgacagtgattgcaggaaacaagcttcgtcttgagatccccatcagcggagaaccacctcctaaagccatgtggagccggggagataaggctattatggaaggcagtggccggataagaacagaatcttaccctgatagcagcactctggtcattgatatagctgaaagagatgactctggtgtttaccacatcaatctgaaaaacgaagctggagaggcacatgcaagcatcaaggttaaagttgtggacttccctgatcctccagtggcaccgactgtgacagaggtgggagatgactggtgtatcatgaactgggagcctcctgcctacgacggaggctctccaatcctaggatattttattgagaggaagaagaaacaaagctccaggtggatgaggctgaattttgatctctgcaaagaaacaacttttgagcccaagaagatgattgaaggtgtggcctatgaggtccgcatctttgcagtcaatgccattggcatctccaagcccagtatgccctccaggccttttgttcctttggctgtaacaagccctcctactcttctgactgtggactctgtcactgacacgactgtcacgatgaggtggcgccccccagaccacattggtgcagcaggtttagatggctatgtgctagagtattgctttgaaggaactgaggactggatagttgcaaacaaagatctgattgacaagacgaagttcaccatcacaggtctgccaacagatgcaaagatctttgtgcgtgtgaaggctgttaatgcagctggtgccagcgagcccaagtactattctcagcccattctcgtgaaggaaatcatagaacctccaaagattcgcattccaagacacctgaagcaaacctatatccgcagagttggagaagctgtcaatctggttatacctttccagggaaaaccaagaccagaattaacttggaagaaggatggtgcagaaattgataagaatcaaataaacattcgcaactctgagactgatacaatcatatttattagaaaagcagagaggagccactctgggaaatatgatctgcaagtcaaagtggacaaattcgtggagaccgcatcaattgacatccagatcattgaccgtccaggtccaccccaaattgtgaagattgaggatgtctggggagaaaatgtcgctctcacatggactccaccaaaggatgatggaaatgctgctatcacaggctataccattcagaaggctgacaagaagagcatggaatggtttactgtcattgagcattatcatcgaaccagtgccaccattactgaattggtcatagggaatgaatattacttccgggtcttttctgaaaacatgtgtggcctcagtgaggatgccaccatgactaaagagagtgcagtgatcgccagggatggtaaaatctacaaaaatccagtgtatgaagactttgatttctcagaggcacccatgtttactcagcctttggttaacacctatgccatagctggttacaatgccaccctaaactgcagtgtgagaggaaatcctaagcctaaaataacctggatgaaaaacaaagttgctattgtggatgatccaagatacaggatgttcagcaaccagggagtctgtaccctggaaattcgcaagcccagcccctatgatggaggcacttactgctgcaaagcagtcaatgaccttgggacagtggagattgaatgcaaactggaggtgaaagtgatatatcaaggagtaaatacccctggacaaccagtcttcctggaggggcagcaacagtcattgcacaataaggatttttgaatgtataatatcatctaaggtgggctctccttctgcagactcctcttgcaaggcgtacctccaaacataattgattcgtatctgcgagacttacactcaagcaatcctgaggaatactgagggagggcctggctactgtctctctgcactctgctgctttgaaatctggttgaaatgagaaaaagcattttctgttttcccaccaggcccccaagtgtggtctttttctttcctcctaatgttgaagagaaaaaaaaaaaaaaaagtttgcccagattgcttaattaaaaattgcaaacaaaatctcatttgaagtcaaaaaaaaaaaaaaaaaaaaa

SEQ ID NO: 71 - DNA, 3935 bp, Homo sapiens
agaggcagtataaaagcactgggtttctccccaactgcttgtcacaccgacctgcaccatctctcgcctgcctgtggggtttctgtcaactagtcgtggagggaaggagactctttaaagaataacatcttattgtggccatgccagaacccactaagaaagaggaaaatgaagtgccagccccagccccacccccggaagaaccaagtaaagagaaggaggccggaactacaccagcaaaagatgaagaggaagtctccccgcctagcgccttgcctccaggtttgggtagtcgggccctggagagaaaagattcagactggacccttgtcgaaactcctcctggggaggaacaagccaagcagaatgccaactcccagctgtccatcttgttcattgaaaaacctcaaggaggaacagtgaaagttggtgaagatatcaccttcatagccaaagtcaaggctgaagatcttctgagaaaacccactatcaaatggttcaaaggaaaatggatggacctggccagcaaagccgggaagcaccttcagctgaaggaaacctttgagaggcacagtcgggtgtacacatttgagatgcagatcatcaaggccaaagataactttgcaggaaattacagatgcgaggtcacctataaggataagtttgacagctgttcatttgatcttgaagtgcacgaatctactgggactactccaaacattgacatcagatctgctttcaagagaagtggagaaggtcaagaggatgcaggagaacttgactttagtggtctcctgaaacgtagggaggtgaagcagcaggaggaagaaccccaggtggacgtatgggagttgctgaagaacgcgaaacccagtgagtacgagaagatcgccttccagtatggaatcaccgacctgcgcggcatgctcaagcgactcaagcgcatgcgcagagaggagaagaagagcgcagcttttgcaaaaattcttgatcctgcatatcaggttgacaaaggaggcagagtgaggtttgttgtggagctggcagatccaaagttggaggtgaaatggtataaaaatggtcaagaaattcgacccagtaccaaatacatctttgaacacaaaggatgccagagaatcctgtttatcaataactgtcagatgacagatgattcagagtattatgtgacagccggtgatgagaaatgttccactgagctcttcgtaagagagcctccaattatggtgaccaaacagctggaagatacaactgcttattgtggggagagagtggaattagaatgtgaggtgtctgaagatgatgccaatgtaaaatggtttaagaatggtgaagagattatccctggtccaaaatcaagataccgaattagagttgagggtaaaaaacacatcttgatcatagagggagcaacaaaggctgatgctgcagaatattcagtaatgacaacaggaggacaatcatctgctaaacttagtgttgacttgaaacctctgaagattttgacacctctgactgatcagactgtaaatcttggaaaagaaatctgcctgaagtgtgaaatctctgaaaacataccaggaaaatggactaaaaatggcctacctgttcaggagagtgaccgtctaaaggtggttcacaagggaaggatccacaagttagtgatagccaatgccctcactgaagatgaaggtgattatgtatttgcacctgatgcctacaatgttactctgcctgccaaagttcatgttattgatcctcctaagatcatcctggatggtcttgatgctgacaacacagtgacagtgattgcaggaaacaagcttcgtcttgagatccccatcagcggagaaccacctcctaaagccatgtggagccggggagataaggctattatggaaggcagtggccggataagaacagaatcttaccctgatagcagcactctggtcattgatatagctgaaagagatgactctggtgtttaccacatcaatctgaaaaacgaagctggagaggcacatgcaagcatcaaggttaaagttgtggacttccctgatcctccagtggcaccgactgtgacagaggtgggagatgactggtgtatcatgaactgggagcctcctgcctacgacggaggctctccaatcctaggatattttattgagaggaagaagaaacaaagctccaggtggatgaggctgaattttgatctctgcaaagaaacaacttttgagcccaagaagatgattgaaggtgtggcctatgaggtccgcatctttgcagtcaatgccattggcatctccaagcccagtatgccctccaggccttttgttcctttggctgtaacaagccctcctactcttctgactgtggactctgtcactgacacgactgtcacgatgaggtggcgccccccagaccacattggtgcagcaggtttagatggctatgtgctagagtattgctttgaaggaactgaggactggatagttgcaaacaaagatctgattgacaagacgaagttcaccatcacaggtctgccaacagatgcaaagatctttgtgcgtgtgaaggctgttaatgcagctggtgccagcgagcccaagtactattctcagcccattctcgtgaaggaaatcatagaacctccaaagattcgcattccaagacacctgaagcaaacctatatccgcagagttggagaagctgtcaatctggttatacctttccagggaaaaccaagaccagaattaacttggaagaaggatggtgcagaaattgataagaatcaaataaacattcgcaactctgagactgatacaatcatatttattagaaaagcagagaggagccactctgggaaatatgatctgcaagtcaaagtggacaaattcgtggagaccgcatcaattgacatccagatcattgaccgtccaggtccaccccaaattgtgaagattgaggatgtctggggagaaaatgtcgctctcacatggactccaccaaaggatgatggaaatgctgctatcacaggctataccattcagaaggctgacaagaagagcatggaatggtttactgtcattgagcattatcatcgaaccagtgccaccattactgaattggtcatagggaatgaatattacttccgggtcttttctgaaaacatgtgtggcctcagtgaggatgccaccatgactaaagagagtgcagtgatcgccagggatggtaaaatctacaaaaatccagtgtatgaagactttgatttctcagaggcacccatgtttactcagcctttggttaacacctatgccatagctggttacaatgccaccctaaactgcagtgtgagaggaaatcctaagcctaaaataacctggatgaaaaacaaagttgctattgtggatgatccaagatacaggatgttcagcaaccagggagtctgtaccctggaaattcgcaagcccagcccctatgatggaggcacttactgctgcaaagcagtcaatgaccttgggacagtggagattgaatgcaaactggaggtgaaagtcattgcacaataaggatttttgaatgtataatatcatctaaggtgggctctccttctgcagactcctcttgcaaggcgtacctccaaacataattgattcgtatctgcgagacttacactcaagcaatcctgaggaatactgagggagggcctggctactgtctctctgcactctgctgctttgaaatctggttgaaatgagaaaaagcattttctgttttcccaccaggcccccaagtgtggtctttttctttcctcctaatgttgaagagaaaaaaaaaaaaaaaagtttgcccagattgcttaattaaaaattgcaaacaaaatctcatttgaagtcaaaaaaaaaaaaaaaaaaaaa

SEQ ID NO: 72 - DNA, 3914 bp, Homo sapiens
agaggcagtataaaagcactgggtttctccccaactgcttgtcacaccgacctgcaccatctctcgcctgcctgtggggtttctgtcaactagtcgtggagggaaggagactctttaaagaataacatcttattgtggccatgccagaacccactaagaaagaggaaaatgaagtgccagccccagccccacccccggaagaaccaagtaaagagaaggaggccggaactacaccagcaaaagactggacccttgtcgaaactcctcctggggaggaacaagccaagcagaatgccaactcccagctgtccatcttgttcattgaaaaacctcaaggaggaacagtgaaagttggtgaagatatcaccttcatagccaaagtcaaggctgaagatcttctgagaaaacccactatcaaatggttcaaaggaaaatggatggacctggccagcaaagccgggaagcaccttcagctgaaggaaacctttgagaggcacagtcgggtgtacacatttgagatgcagatcatcaaggccaaagataactttgcaggaaattacagatgcgaggtcacctataaggataagtttgacagctgttcatttgatcttgaagtgcacgaatctactgggactactccaaacattgacatcagatctgctttcaagagaagtggagaaggtcaagaggatgcaggagaacttgactttagtggtctcctgaaacgtagggaggtgaagcagcaggaggaagaaccccaggtggacgtatgggagttgctgaagaacgcgaaacccagtgagtacgagaagatcgccttccagtatggaatcaccgacctgcgcggcatgctcaagcgactcaagcgcatgcgcagagaggagaagaagagcgcagcttttgcaaaaattcttgatcctgcatatcaggttgacaaaggaggcagagtgaggtttgttgtggagctggcagatccaaagttggaggtgaaatggtataaaaatggtcaagaaattcgacccagtaccaaatacatctttgaacacaaaggatgccagagaatcctgtttatcaataactgtcagatgacagatgattcagagtattatgtgacagccggtgatgagaaatgttccactgagctcttcgtaagagagcctccaattatggtgaccaaacagctggaagatacaactgcttattgtggggagagagtggaattagaatgtgaggtgtctgaagatgatgccaatgtaaaatggtttaagaatggtgaagagattatccctggtccaaaatcaagataccgaattagagttgagggtaaaaaacacatcttgatcatagagggagcaacaaaggctgatgctgcagaatattcagtaatgacaacaggaggacaatcatctgctaaacttagtgttgacttgaaacctctgaagattttgacacctctgactgatcagactgtaaatcttggaaaagaaatctgcctgaagtgtgaaatctctgaaaacataccaggaaaatggactaaaaatggcctacctgttcaggagagtgaccgtctaaaggtggttcacaagggaaggatccacaagttagtgatagccaatgccctcactgaagatgaaggtgattatgtatttgcacctgatgcctacaatgttactctgcctgccaaagttcatgttattgatcctcctaagatcatcctggatggtcttgatgctgacaacacagtgacagtgattgcaggaaacaagcttcgtcttgagatccccatcagcggagaaccacctcctaaagccatgtggagccggggagataaggctattatggaaggcagtggccggataagaacagaatcttaccctgatagcagcactctggtcattgatatagctgaaagagatgactctggtgtttaccacatcaatctgaaaaacgaagctggagaggcacatgcaagcatcaaggttaaagttgtggacttccctgatcctccagtggcaccgactgtgacagaggtgggagatgactggtgtatcatgaactgggagcctcctgcctacgacggaggctctccaatcctaggatattttattgagaggaagaagaaacaaagctccaggtggatgaggctgaattttgatctctgcaaagaaacaacttttgagcccaagaagatgattgaaggtgtggcctatgaggtccgcatctttgcagtcaatgccattggcatctccaagcccagtatgccctccaggccttttgttcctttggctgtaacaagccctcctactcttctgactgtggactctgtcactgacacgactgtcacgatgaggtggcgccccccagaccacattggtgcagcaggtttagatggctatgtgctagagtattgctttgaaggaagtacatcagcaaaacagtctgatgaaaatggggaggctgcctatgatctgccagctgaggactggatagttgcaaacaaagatctgattgacaagacgaagttcaccatcacaggtctgccaacagatgcaaagatctttgtgcgtgtgaaggctgttaatgcagctggtgccagcgagcccaagtactattctcagcccattctcgtgaaggaaatcatagaacctccaaagattcgcattccaagacacctgaagcaaacctatatccgcagagttggagaagctgtcaatctggttatacctttccagggaaaaccaagaccagaattaacttggaagaaggatggtgcagaaattgataagaatcaaataaacattcgcaactctgagactgatacaatcatatttattagaaaagcagagaggagccactctgggaaatatgatctgcaagtcaaagtggacaaattcgtggagaccgcatcaattgacatccagatcattgaccgtccaggtccaccccaaattgtgaagattgaggatgtctggggagaaaatgtcgctctcacatggactccaccaaaggatgatggaaatgctgctatcacaggctataccattcagaaggctgacaagaagagcatggaatggtttactgtcattgagcattatcatcgaaccagtgccaccattactgaattggtcatagggaatgaatattacttccgggtcttttctgaaaacatgtgtggcctcagtgaggatgccaccatgactaaagagagtgcagtgatcgccagggatggtaaaatctacaaaaatccagtgtatgaagactttgatttctcagaggcacccatgtttactcagcctttggttaacacctatgccatagctggttacaatgccaccctaaactgcagtgtgagaggaaatcctaagcctaaaataacctggatgaaaaacaaagttgctattgtggatgatccaagatacaggatgttcagcaaccagggagtctgtaccctggaaattcgcaagcccagcccctatgatggaggcacttactgctgcaaagcagtcaatgaccttgggacagtggagattgaatgcaaactggaggtgaaagtcattgcacaataaggatttttgaatgtataatatcatctaaggtgggctctccttctgcagactcctcttgcaaggcgtacctccaaacataattgattcgtatctgcgagacttacactcaagcaatcctgaggaatactgagggagggcctggctactgtctctctgcactctgctgctttgaaatctggttgaaatgagaaaaagcattttctgttttcccaccaggcccccaagtgtggtctttttctttcctcctaatgttgaagagaaaaaaaaaaaaaaaagtttgcccagattgcttaattaaaaattgcaaacaaaatctcatttgaagtcaaaaaaaaaaaaaaaaaaaaa

SEQ ID NO: 73 - DNA, 3860 bp, Homo sapiens
agaggcagtataaaagcactgggtttctccccaactgcttgtcacaccgacctgcaccatctctcgcctgcctgtggggtttctgtcaactagtcgtggagggaaggagactctttaaagaataacatcttattgtggccatgccagaacccactaagaaagaggaaaatgaagtgccagccccagccccacccccggaagaaccaagtaaagagaaggaggccggaactacaccagcaaaagactggacccttgtcgaaactcctcctggggaggaacaagccaagcagaatgccaactcccagctgtccatcttgttcattgaaaaacctcaaggaggaacagtgaaagttggtgaagatatcaccttcatagccaaagtcaaggctgaagatcttctgagaaaacccactatcaaatggttcaaaggaaaatggatggacctggccagcaaagccgggaagcaccttcagctgaaggaaacctttgagaggcacagtcgggtgtacacatttgagatgcagatcatcaaggccaaagataactttgcaggaaattacagatgcgaggtcacctataaggataagtttgacagctgttcatttgatcttgaagtgcacgaatctactgggactactccaaacattgacatcagatctgctttcaagagaagtggagaaggtcaagaggatgcaggagaacttgactttagtggtctcctgaaacgtagggaggtgaagcagcaggaggaagaaccccaggtggacgtatgggagttgctgaagaacgcgaaacccagtgagtacgagaagatcgccttccagtatggaatcaccgacctgcgcggcatgctcaagcgactcaagcgcatgcgcagagaggagaagaagagcgcagcttttgcaaaaattcttgatcctgcatatcaggttgacaaaggaggcagagtgaggtttgttgtggagctggcagatccaaagttggaggtgaaatggtataaaaatggtcaagaaattcgacccagtaccaaatacatctttgaacacaaaggatgccagagaatcctgtttatcaataactgtcagatgacagatgattcagagtattatgtgacagccggtgatgagaaatgttccactgagctcttcgtaagagagcctccaattatggtgaccaaacagctggaagatacaactgcttattgtggggagagagtggaattagaatgtgaggtgtctgaagatgatgccaatgtaaaatggtttaagaatggtgaagagattatccctggtccaaaatcaagataccgaattagagttgagggtaaaaaacacatcttgatcatagagggagcaacaaaggctgatgctgcagaatattcagtaatgacaacaggaggacaatcatctgctaaacttagtgttgacttgaaacctctgaagattttgacacctctgactgatcagactgtaaatcttggaaaagaaatctgcctgaagtgtgaaatctctgaaaacataccaggaaaatggactaaaaatggcctacctgttcaggagagtgaccgtctaaaggtggttcacaagggaaggatccacaagttagtgatagccaatgccctcactgaagatgaaggtgattatgtatttgcacctgatgcctacaatgttactctgcctgccaaagttcatgttattgatcctcctaagatcatcctggatggtcttgatgctgacaacacagtgacagtgattgcaggaaacaagcttcgtcttgagatccccatcagcggagaaccacctcctaaagccatgtggagccggggagataaggctattatggaaggcagtggccggataagaacagaatcttaccctgatagcagcactctggtcattgatatagctgaaagagatgactctggtgtttaccacatcaatctgaaaaacgaagctggagaggcacatgcaagcatcaaggttaaagttgtggacttccctgatcctccagtggcaccgactgtgacagaggtgggagatgactggtgtatcatgaactgggagcctcctgcctacgacggaggctctccaatcctaggatattttattgagaggaagaagaaacaaagctccaggtggatgaggctgaattttgatctctgcaaagaaacaacttttgagcccaagaagatgattgaaggtgtggcctatgaggtccgcatctttgcagtcaatgccattggcatctccaagcccagtatgccctccaggccttttgttcctttggctgtaacaagccctcctactcttctgactgtggactctgtcactgacacgactgtcacgatgaggtggcgccccccagaccacattggtgcagcaggtttagatggctatgtgctagagtattgctttgaaggaactgaggactggatagttgcaaacaaagatctgattgacaagacgaagttcaccatcacaggtctgccaacagatgcaaagatctttgtgcgtgtgaaggctgttaatgcagctggtgccagcgagcccaagtactattctcagcccattctcgtgaaggaaatcatagaacctccaaagattcgcattccaagacacctgaagcaaacctatatccgcagagttggagaagctgtcaatctggttatacctttccagggaaaaccaagaccagaattaacttggaagaaggatggtgcagaaattgataagaatcaaataaacattcgcaactctgagactgatacaatcatatttattagaaaagcagagaggagccactctgggaaatatgatctgcaagtcaaagtggacaaattcgtggagaccgcatcaattgacatccagatcattgaccgtccaggtccaccccaaattgtgaagattgaggatgtctggggagaaaatgtcgctctcacatggactccaccaaaggatgatggaaatgctgctatcacaggctataccattcagaaggctgacaagaagagcatggaatggtttactgtcattgagcattatcatcgaaccagtgccaccattactgaattggtcatagggaatgaatattacttccgggtcttttctgaaaacatgtgtggcctcagtgaggatgccaccatgactaaagagagtgcagtgatcgccagggatggtaaaatctacaaaaatccagtgtatgaagactttgatttctcagaggcacccatgtttactcagcctttggttaacacctatgccatagctggttacaatgccaccctaaactgcagtgtgagaggaaatcctaagcctaaaataacctggatgaaaaacaaagttgctattgtggatgatccaagatacaggatgttcagcaaccagggagtctgtaccctggaaattcgcaagcccagcccctatgatggaggcacttactgctgcaaagcagtcaatgaccttgggacagtggagattgaatgcaaactggaggtgaaagtcattgcacaataaggatttttgaatgtataatatcatctaaggtgggctctccttctgcagactcctcttgcaaggcgtacctccaaacataattgattcgtatctgcgagacttacactcaagcaatcctgaggaatactgagggagggcctggctactgtctctctgcactctgctgctttgaaatctggttgaaatgagaaaaagcattttctgttttcccaccaggcccccaagtgtggtctttttctttcctcctaatgttgaagagaaaaaaaaaaaaaaaagtttgcccagattgcttaattaaaaattgcaaacaaaatctcatttgaagtcaaaaaaaaaaaaaaaaaaaaa

SEQ ID NO: 74 - protein, 1173 aa, Homo sapiens
MPEPTKKEENEVPAPAPPPEEPSKEKEAGTTPAKDWTLVETPPGEEQAKQNANSQLSILFIEKPQGGTVKVGEDITFIAKVKAEDLLRKPTIKWFKGKWMDLASKAGKHLQLKETFERHSRVYTFEMQIIKAKDNFAGNYRCEVTYKDKFDSCSFDLEVHESTGTTPNIDIRSAFKRSGEGQEDAGELDFSGLLKRREVKQQEEEPQVDVWELLKNAKPSEYEKIAFQYGITDLRGMLKRLKRMRREEKKSAAFAKILDPAYQVDKGGRVRFVVELADPKLEVKWYKNGQEIRPSTKYIFEHKGCQRILFINNCQMTDDSEYYVTAGDEKCSTELFVREPPIMVTKQLEDTTAYCGERVELECEVSEDDANVKWFKNGEEIIPGPKSRYRIRVEGKKHILIIEGATKADAAEYSVMTTGGQSSAKLSVDLKPLKILTPLTDQTVNLGKEICLKCEISENIPGKWTKNGLPVQESDRLKVVHKGRIHKLVIANALTEDEGDYVFAPDAYNVTLPAKVHVIDPPKIILDGLDADNTVTVIAGNKLRLEIPISGEPPPKAMWSRGDKAIMEGSGRIRTESYPDSSTLVIDIAERDDSGVYHINLKNEAGEAHASIKVKVVDFPDPPVAPTVTEVGDDWCIMNWEPPAYDGGSPILGYFIERKKKQSSRWMRLNFDLCKETTFEPKKMIEGVAYEVRIFAVNAIGISKPSMPSRPFVPLAVTSPPTLLTVDSVTDTTVTMRWRPPDHIGAAGLDGYVLEYCFEGSTSAKQSDENGEAAYDLPAEDWIVANKDLIDKTKFTITGLPTDAKIFVRVKAVNAAGASEPKYYSQPILVKEIIEPPKIRIPRHLKQTYIRRVGEAVNLVIPFQGKPRPELTWKKDGAEIDKNQINIRNSETDTIIFIRKAERSHSGKYDLQVKVDKFVETASIDIQIIDRPGPPQIVKIEDVWGENVALTWTPPKDDGNAAITGYTIQKADKKSMEWFTVIEHYHRTSATITELVIGNEYYFRVFSENMCGLSEDATMTKESAVIARDGKIYKNPVYEDFDFSEAPMFTQPLVNTYAIAGYNATLNCSVRGNPKPKITWMKNKVAIVDDPRYRMFSNQGVCTLEIRKPSPYDGGTYCCKAVNDLGTVEIECKLEVKVIYQGVNTPGQPVFLEGQQQVGSPSADSSCKAYLQT

SEQ ID NO: 75 - protein, 1146 aa, Homo sapiens
MPEPTKKEENEVPAPAPPPEEPSKEKEAGTTPAKDWTLVETPPGEEQAKQNANSQLSILFIEKPQGGTVKVGEDITFIAKVKAEDLLRKPTIKWFKGKWMDLASKAGKHLQLKETFERHSRVYTFEMQIIKAKDNFAGNYRCEVTYKDKFDSCSFDLEVHESTGTTPNIDIRSAFKRSGEGQEDAGELDFSGLLKRREVKQQEEEPQVDVWELLKNAKPSEYEKIAFQYGITDLRGMLKRLKRMRREEKKSAAFAKILDPAYQVDKGGRVRFVVELADPKLEVKWYKNGQEIRPSTKYIFEHKGCQRILFINNCQMTDDSEYYVTAGDEKCSTELFVREPPIMVTKQLEDTTAYCGERVELECEVSEDDANVKWFKNGEEIIPGPKSRYRIRVEGKKHILIIEGATKADAAEYSVMTTGGQSSAKLSVDLKPLKILTPLTDQTVNLGKEICLKCEISENIPGKWTKNGLPVQESDRLKVVHKGRIHKLVIANALTEDEGDYVFAPDAYNVTLPAKVHVIDPPKIILDGLDADNTVTVIAGNKLRLEIPISGEPPPKAMWSRGDKAIMEGSGRIRTESYPDSSTLVIDIAERDDSGVYHINLKNEAGEAHASIKVKVVDFPDPPVAPTVTEVGDDWCIMNWEPPAYDGGSPILGYFIERKKKQSSRWMRLNFDLCKETTFEPKKMIEGVAYEVRIFAVNAIGISKPSMPSRPFVPLAVTSPPTLLTVDSVTDTTVTMRWRPPDHIGAAGLDGYVLEYCFEGTEDWIVANKDLIDKTKFTITGLPTDAKIFVRVKAVNAAGASEPKYYSQPILVKEIIEPPKIRIPRHLKQTYIRRVGEAVNLVIPFQGKPRPELTWKKDGAEIDKNQINIRNSETDTIIFIRKAERSHSGKYDLQVKVDKFVETASIDIQIIDRPGPPQIVKIEDVWGENVALTWTPPKDDGNAAITGYTIQKADKKSMEWFTVIEHYHRTSATITELVIGNEYYFRVFSENMCGLSEDATMTKESAVIARDGKIYKNPVYEDFDFSEAPMFTQPLVNTYAIAGYNATLNCSVRGNPKPKITWMKNKVAIVDDPRYRMFSNQGVCTLEIRKPSPYDGGTYCCKAVNDLGTVEIECKLEVKVIYQGVNTPGQPVFLEGQQQSLHNKDF

SEQ ID NO: 76 - protein, 1134 aa, Homo sapiens
MPEPTKKEEPSKEKEAGTTPAKDWTLVETPPGEEQAKQNANSQLSILFIEKPQGGTVKVGEDITFIAKVKAEDLLRKPTIKWFKGKWMDLASKAGKHLQLKETFERHSRVYTFEMQIIKAKDNFAGNYRCEVTYKDKFDSCSFDLEVHESTGTTPNIDIRSAFKRSGEGQEDAGELDFSGLLKRREVKQQEEEPQVDVWELLKNAKPSEYEKIAFQYGITDLRGMLKRLKRMRREEKKSAAFAKILDPAYQVDKGGRVRFVVELADPKLEVKWYKNGQEIRPSTKYIFEHKGCQRILFINNCQMTDDSEYYVTAGDEKCSTELFVREPPIMVTKQLEDTTAYCGERVELECEVSEDDANVKWFKNGEEIIPGPKSRYRIRVEGKKHILIIEGATKADAAEYSVMTTGGQSSAKLSVDLKPLKILTPLTDQTVNLGKEICLKCEISENIPGKWTKNGLPVQESDRLKVVHKGRIHKLVIANALTEDEGDYVFAPDAYNVTLPAKVHVIDPPKIILDGLDADNTVTVIAGNKLRLEIPISGEPPPKAMWSRGDKAIMEGSGRIRTESYPDSSTLVIDIAERDDSGVYHINLKNEAGEAHASIKVKVVDFPDPPVAPTVTEVGDDWCIMNWEPPAYDGGSPILGYFIERKKKQSSRWMRLNFDLCKETTFEPKKMIEGVAYEVRIFAVNAIGISKPSMPSRPFVPLAVTSPPTLLTVDSVTDTTVTMRWRPPDHIGAAGLDGYVLEYCFEGTEDWIVANKDLIDKTKFTITGLPTDAKIFVRVKAVNAAGASEPKYYSQPILVKEIIEPPKIRIPRHLKQTYIRRVGEAVNLVIPFQGKPRPELTWKKDGAEIDKNQINIRNSETDTIIFIRKAERSHSGKYDLQVKVDKFVETASIDIQIIDRPGPPQIVKIEDVWGENVALTWTPPKDDGNAAITGYTIQKADKKSMEWFTVIEHYHRTSATITELVIGNEYYFRVFSENMCGLSEDATMTKESAVIARDGKIYKNPVYEDFDFSEAPMFTQPLVNTYAIAGYNATLNCSVRGNPKPKITWMKNKVAIVDDPRYRMFSNQGVCTLEIRKPSPYDGGTYCCKAVNDLGTVEIECKLEVKVIYQGVNTPGQPVFLEGQQQSLHNKDF

SEQ ID NO: 77 - protein, 1127 aa, Homo sapiens
MPEPTKKEENEVPAPAPPPEEPSKEKEAGTTPAKDWTLVETPPGEEQAKQNANSQLSILFIEKPQGGTVKVGEDITFIAKVKAEDLLRKPTIKWFKGKWMDLASKAGKHLQLKETFERHSRVYTFEMQIIKAKDNFAGNYRCEVTYKDKFDSCSFDLEVHESTGTTPNIDIRSAFKRREVKQQEEEPQVDVWELLKNAKPSEYEKIAFQYGITDLRGMLKRLKRMRREEKKSAAFAKILDPAYQVDKGGRVRFVVELADPKLEVKWYKNGQEIRPSTKYIFEHKGCQRILFINNCQMTDDSEYYVTAGDEKCSTELFVREPPIMVTKQLEDTTAYCGERVELECEVSEDDANVKWFKNGEEIIPGPKSRYRIRVEGKKHILIIEGATKADAAEYSVMTTGGQSSAKLSVDLKPLKILTPLTDQTVNLGKEICLKCEISENIPGKWTKNGLPVQESDRLKVVHKGRIHKLVIANALTEDEGDYVFAPDAYNVTLPAKVHVIDPPKIILDGLDADNTVTVIAGNKLRLEIPISGEPPPKAMWSRGDKAIMEGSGRIRTESYPDSSTLVIDIAERDDSGVYHINLKNEAGEAHASIKVKVVDFPDPPVAPTVTEVGDDWCIMNWEPPAYDGGSPILGYFIERKKKQSSRWMRLNFDLCKETTFEPKKMIEGVAYEVRIFAVNAIGISKPSMPSRPFVPLAVTSPPTLLTVDSVTDTTVTMRWRPPDHIGAAGLDGYVLEYCFEGTEDWIVANKDLIDKTKFTITGLPTDAKIFVRVKAVNAAGASEPKYYSQPILVKEIIEPPKIRIPRHLKQTYIRRVGEAVNLVIPFQGKPRPELTWKKDGAEIDKNQINIRNSETDTIIFIRKAERSHSGKYDLQVKVDKFVETASIDIQIIDRPGPPQIVKIEDVWGENVALTWTPPKDDGNAAITGYTIQKADKKSMEWFTVIEHYHRTSATITELVIGNEYYFRVFSENMCGLSEDATMTKESAVIARDGKIYKNPVYEDFDFSEAPMFTQPLVNTYAIAGYNATLNCSVRGNPKPKITWMKNKVAIVDDPRYRMFSNQGVCTLEIRKPSPYDGGTYCCKAVNDLGTVEIECKLEVKVIYQGVNTPGQPVFLEGQQQSLHNKDF

SEQ ID NO: 78 - protein, 1120 aa, Homo sapiens
MPEPTKKEDWTLVETPPGEEQAKQNANSQLSILFIEKPQGGTVKVGEDITFIAKVKAEDLLRKPTIKWFKGKWMDLASKAGKHLQLKETFERHSRVYTFEMQIIKAKDNFAGNYRCEVTYKDKFDSCSFDLEVHESTGTTPNIDIRSAFKRSGEGQEDAGELDFSGLLKRREVKQQEEEPQVDVWELLKNAKPSEYEKIAFQYGITDLRGMLKRLKRMRREEKKSAAFAKILDPAYQVDKGGRVRFVVELADPKLEVKWYKNGQEIRPSTKYIFEHKGCQRILFINNCQMTDDSEYYVTAGDEKCSTELFVREPPIMVTKQLEDTTAYCGERVELECEVSEDDANVKWFKNGEEIIPGPKSRYRIRVEGKKHILIIEGATKADAAEYSVMTTGGQSSAKLSVDLKPLKILTPLTDQTVNLGKEICLKCEISENIPGKWTKNGLPVQESDRLKVVHKGRIHKLVIANALTEDEGDYVFAPDAYNVTLPAKVHVIDPPKIILDGLDADNTVTVIAGNKLRLEIPISGEPPPKAMWSRGDKAIMEGSGRIRTESYPDSSTLVIDIAERDDSGVYHINLKNEAGEAHASIKVKVVDFPDPPVAPTVTEVGDDWCIMNWEPPAYDGGSPILGYFIERKKKQSSRWMRLNFDLCKETTFEPKKMIEGVAYEVRIFAVNAIGISKPSMPSRPFVPLAVTSPPTLLTVDSVTDTTVTMRWRPPDHIGAAGLDGYVLEYCFEGTEDWIVANKDLIDKTKFTITGLPTDAKIFVRVKAVNAAGASEPKYYSQPILVKEIIEPPKIRIPRHLKQTYIRRVGEAVNLVIPFQGKPRPELTWKKDGAEIDKNQINIRNSETDTIIFIRKAERSHSGKYDLQVKVDKFVETASIDIQIIDRPGPPQIVKIEDVWGENVALTWTPPKDDGNAAITGYTIQKADKKSMEWFTVIEHYHRTSATITELVIGNEYYFRVFSENMCGLSEDATMTKESAVIARDGKIYKNPVYEDFDFSEAPMFTQPLVNTYAIAGYNATLNCSVRGNPKPKITWMKNKVAIVDDPRYRMFSNQGVCTLEIRKPSPYDGGTYCCKAVNDLGTVEIECKLEVKVIYQGVNTPGQPVFLEGQQQSLHNKDF

SEQ ID NO: 79 - protein, 1139 aa, Homo sapiens
MPEPTKKEDEEEVSPPSALPPDWTLVETPPGEEQAKQNANSQLSILFIEKPQGGTVKVGEDITFIAKVKAEDLLRKPTIKWFKGKWMDLASKAGKHLQLKETFERHSRVYTFEMQIIKAKDNFAGNYRCEVTYKDKFDSCSFDLEVHESTGTTPNIDIRSAFKRSGEGQEDAGELDFSGLLKRREVKQQEEEPQVDVWELLKNAKPSEYEKIAFQYGITDLRGMLKRLKRMRREEKKSAAFAKILDPAYQVDKGGRVRFVVELADPKLEVKWYKNGQEIRPSTKYIFEHKGCQRILFINNCQMTDDSEYYVTAGDEKCSTELFVREPPIMVTKQLEDTTAYCGERVELECEVSEDDANVKWFKNGEEIIPGPKSRYRIRVEGKKHILIIEGATKADAAEYSVMTTGGQSSAKLSVDLKPLKILTPLTDQTVNLGKEICLKCEISENIPGKWTKNGLPVQESDRLKVVHKGRIHKLVIANALTEDEGDYVFAPDAYNVTLPAKVHVIDPPKIILDGLDADNTVTVIAGNKLRLEIPISGEPPPKAMWSRGDKAIMEGSGRIRTESYPDSSTLVIDIAERDDSGVYHINLKNEAGEAHASIKVKVVDFPDPPVAPTVTEVGDDWCIMNWEPPAYDGGSPILGYFIERKKKQSSRWMRLNFDLCKETTFEPKKMIEGVAYEVRIFAVNAIGISKPSMPSRPFVPLAVTSPPTLLTVDSVTDTTVTMRWRPPDHIGAAGLDGYVLEYCFEGTEDWIVANKDLIDKTKFTITGLPTDAKIFVRVKAVNAAGASEPKYYSQPILVKEIIEPPKIRIPRHLKQTYIRRVGEAVNLVIPFQGKPRPELTWKKDGAEIDKNQINIRNSETDTIIFIRKAERSHSGKYDLQVKVDKFVETASIDIQIIDRPGPPQIVKIEDVWGENVALTWTPPKDDGNAAITGYTIQKADKKSMEWFTVIEHYHRTSATITELVIGNEYYFRVFSENMCGLSEDATMTKESAVIARDGKIYKNPVYEDFDFSEAPMFTQPLVNTYAIAGYNATLNCSVRGNPKPKITWMKNKVAIVDDPRYRMFSNQGVCTLEIRKPSPYDGGTYCCKAVNDLGTVEIECKLEVKGGLSFCRLLLQGVPPNIIDSYLRDLHSSNPEEY

SEQ ID NO: 80 - protein, 1171 aa, Homo sapiens
MPEPTKKEENEVPAPAPPPEEPSKEKEAGTTPAKDEEEVSPPSALPPGLGSRALERKDSDWTLVETPPGEEQAKQNANSQLSILFIEKPQGGTVKVGEDITFIAKVKAEDLLRKPTIKWFKGKWMDLASKAGKHLQLKETFERHSRVYTFEMQIIKAKDNFAGNYRCEVTYKDKFDSCSFDLEVHESTGTTPNIDIRSAFKRSGEGQEDAGELDFSGLLKRREVKQQEEEPQVDVWELLKNAKPSEYEKIAFQYGITDLRGMLKRLKRMRREEKKSAAFAKILDPAYQVDKGGRVRFVVELADPKLEVKWYKNGQEIRPSTKYIFEHKGCQRILFINNCQMTDDSEYYVTAGDEKCSTELFVREPPIMVTKQLEDTTAYCGERVELECEVSEDDANVKWFKNGEEIIPGPKSRYRIRVEGKKHILIIEGATKADAAEYSVMTTGGQSSAKLSVDLKPLKILTPLTDQTVNLGKEICLKCEISENIPGKWTKNGLPVQESDRLKVVHKGRIHKLVIANALTEDEGDYVFAPDAYNVTLPAKVHVIDPPKIILDGLDADNTVTVIAGNKLRLEIPISGEPPPKAMWSRGDKAIMEGSGRIRTESYPDSSTLVIDIAERDDSGVYHINLKNEAGEAHASIKVKVVDFPDPPVAPTVTEVGDDWCIMNWEPPAYDGGSPILGYFIERKKKQSSRWMRLNFDLCKETTFEPKKMIEGVAYEVRIFAVNAIGISKPSMPSRPFVPLAVTSPPTLLTVDSVTDTTVTMRWRPPDHIGAAGLDGYVLEYCFEGTEDWIVANKDLIDKTKFTITGLPTDAKIFVRVKAVNAAGASEPKYYSQPILVKEIIEPPKIRIPRHLKQTYIRRVGEAVNLVIPFQGKPRPELTWKKDGAEIDKNQINIRNSETDTIIFIRKAERSHSGKYDLQVKVDKFVETASIDIQIIDRPGPPQIVKIEDVWGENVALTWTPPKDDGNAAITGYTIQKADKKSMEWFTVIEHYHRTSATITELVIGNEYYFRVFSENMCGLSEDATMTKESAVIARDGKIYKNPVYEDFDFSEAPMFTQPLVNTYAIAGYNATLNCSVRGNPKPKITWMKNKVAIVDDPRYRMFSNQGVCTLEIRKPSPYDGGTYCCKAVNDLGTVEIECKLEVKVIYQGVNTPGQPVFLEGQQQSLHNKDF

SEQ ID NO: 81 - protein, 1148 aa, Homo sapiens
MPEPTKKEENEVPAPAPPPEEPSKEKEAGTTPAKDEEEVSPPSALPPGLGSRALERKDSDWTLVETPPGEEQAKQNANSQLSILFIEKPQGGTVKVGEDITFIAKVKAEDLLRKPTIKWFKGKWMDLASKAGKHLQLKETFERHSRVYTFEMQIIKAKDNFAGNYRCEVTYKDKFDSCSFDLEVHESTGTTPNIDIRSAFKRSGEGQEDAGELDFSGLLKRREVKQQEEEPQVDVWELLKNAKPSEYEKIAFQYGITDLRGMLKRLKRMRREEKKSAAFAKILDPAYQVDKGGRVRFVVELADPKLEVKWYKNGQEIRPSTKYIFEHKGCQRILFINNCQMTDDSEYYVTAGDEKCSTELFVREPPIMVTKQLEDTTAYCGERVELECEVSEDDANVKWFKNGEEIIPGPKSRYRIRVEGKKHILIIEGATKADAAEYSVMTTGGQSSAKLSVDLKPLKILTPLTDQTVNLGKEICLKCEISENIPGKWTKNGLPVQESDRLKVVHKGRIHKLVIANALTEDEGDYVFAPDAYNVTLPAKVHVIDPPKIILDGLDADNTVTVIAGNKLRLEIPISGEPPPKAMWSRGDKAIMEGSGRIRTESYPDSSTLVIDIAERDDSGVYHINLKNEAGEAHASIKVKVVDFPDPPVAPTVTEVGDDWCIMNWEPPAYDGGSPILGYFIERKKKQSSRWMRLNFDLCKETTFEPKKMIEGVAYEVRIFAVNAIGISKPSMPSRPFVPLAVTSPPTLLTVDSVTDTTVTMRWRPPDHIGAAGLDGYVLEYCFEGTEDWIVANKDLIDKTKFTITGLPTDAKIFVRVKAVNAAGASEPKYYSQPILVKEIIEPPKIRIPRHLKQTYIRRVGEAVNLVIPFQGKPRPELTWKKDGAEIDKNQINIRNSETDTIIFIRKAERSHSGKYDLQVKVDKFVETASIDIQIIDRPGPPQIVKIEDVWGENVALTWTPPKDDGNAAITGYTIQKADKKSMEWFTVIEHYHRTSATITELVIGNEYYFRVFSENMCGLSEDATMTKESAVIARDGKIYKNPVYEDFDFSEAPMFTQPLVNTYAIAGYNATLNCSVRGNPKPKITWMKNKVAIVDDPRYRMFSNQGVCTLEIRKPSPYDGGTYCCKAVNDLGTVEIECKLEVKVIAQ

SEQ ID NO: 82 - protein, 1141 aa, Homo sapiens
MPEPTKKEENEVPAPAPPPEEPSKEKEAGTTPAKDWTLVETPPGEEQAKQNANSQLSILFIEKPQGGTVKVGEDITFIAKVKAEDLLRKPTIKWFKGKWMDLASKAGKHLQLKETFERHSRVYTFEMQIIKAKDNFAGNYRCEVTYKDKFDSCSFDLEVHESTGTTPNIDIRSAFKRSGEGQEDAGELDFSGLLKRREVKQQEEEPQVDVWELLKNAKPSEYEKIAFQYGITDLRGMLKRLKRMRREEKKSAAFAKILDPAYQVDKGGRVRFVVELADPKLEVKWYKNGQEIRPSTKYIFEHKGCQRILFINNCQMTDDSEYYVTAGDEKCSTELFVREPPIMVTKQLEDTTAYCGERVELECEVSEDDANVKWFKNGEEIIPGPKSRYRIRVEGKKHILIIEGATKADAAEYSVMTTGGQSSAKLSVDLKPLKILTPLTDQTVNLGKEICLKCEISENIPGKWTKNGLPVQESDRLKVVHKGRIHKLVIANALTEDEGDYVFAPDAYNVTLPAKVHVIDPPKIILDGLDADNTVTVIAGNKLRLEIPISGEPPPKAMWSRGDKAIMEGSGRIRTESYPDSSTLVIDIAERDDSGVYHINLKNEAGEAHASIKVKVVDFPDPPVAPTVTEVGDDWCIMNWEPPAYDGGSPILGYFIERKKKQSSRWMRLNFDLCKETTFEPKKMIEGVAYEVRIFAVNAIGISKPSMPSRPFVPLAVTSPPTLLTVDSVTDTTVTMRWRPPDHIGAAGLDGYVLEYCFEGSTSAKQSDENGEAAYDLPAEDWIVANKDLIDKTKFTITGLPTDAKIFVRVKAVNAAGASEPKYYSQPILVKEIIEPPKIRIPRHLKQTYIRRVGEAVNLVIPFQGKPRPELTWKKDGAEIDKNQINIRNSETDTIIFIRKAERSHSGKYDLQVKVDKFVETASIDIQIIDRPGPPQIVKIEDVWGENVALTWTPPKDDGNAAITGYTIQKADKKSMEWFTVIEHYHRTSATITELVIGNEYYFRVFSENMCGLSEDATMTKESAVIARDGKIYKNPVYEDFDFSEAPMFTQPLVNTYAIAGYNATLNCSVRGNPKPKITWMKNKVAIVDDPRYRMFSNQGVCTLEIRKPSPYDGGTYCCKAVNDLGTVEIECKLEVKVIAQ

SEQ ID NO: 83 - protein, 1123 aa, Homo sapiens
MPEPTKKEENEVPAPAPPPEEPSKEKEAGTTPAKDWTLVETPPGEEQAKQNANSQLSILFIEKPQGGTVKVGEDITFIAKVKAEDLLRKPTIKWFKGKWMDLASKAGKHLQLKETFERHSRVYTFEMQIIKAKDNFAGNYRCEVTYKDKFDSCSFDLEVHESTGTTPNIDIRSAFKRSGEGQEDAGELDFSGLLKRREVKQQEEEPQVDVWELLKNAKPSEYEKIAFQYGITDLRGMLKRLKRMRREEKKSAAFAKILDPAYQVDKGGRVRFVVELADPKLEVKWYKNGQEIRPSTKYIFEHKGCQRILFINNCQMTDDSEYYVTAGDEKCSTELFVREPPIMVTKQLEDTTAYCGERVELECEVSEDDANVKWFKNGEEIIPGPKSRYRIRVEGKKHILIIEGATKADAAEYSVMTTGGQSSAKLSVDLKPLKILTPLTDQTVNLGKEICLKCEISENIPGKWTKNGLPVQESDRLKVVHKGRIHKLVIANALTEDEGDYVFAPDAYNVTLPAKVHVIDPPKIILDGLDADNTVTVIAGNKLRLEIPISGEPPPKAMWSRGDKAIMEGSGRIRTESYPDSSTLVIDIAERDDSGVYHINLKNEAGEAHASIKVKVVDFPDPPVAPTVTEVGDDWCIMNWEPPAYDGGSPILGYFIERKKKQSSRWMRLNFDLCKETTFEPKKMIEGVAYEVRIFAVNAIGISKPSMPSRPFVPLAVTSPPTLLTVDSVTDTTVTMRWRPPDHIGAAGLDGYVLEYCFEGTEDWIVANKDLIDKTKFTITGLPTDAKIFVRVKAVNAAGASEPKYYSQPILVKEIIEPPKIRIPRHLKQTYIRRVGEAVNLVIPFQGKPRPELTWKKDGAEIDKNQINIRNSETDTIIFIRKAERSHSGKYDLQVKVDKFVETASIDIQIIDRPGPPQIVKIEDVWGENVALTWTPPKDDGNAAITGYTIQKADKKSMEWFTVIEHYHRTSATITELVIGNEYYFRVFSENMCGLSEDATMTKESAVIARDGKIYKNPVYEDFDFSEAPMFTQPLVNTYAIAGYNATLNCSVRGNPKPKITWMKNKVAIVDDPRYRMFSNQGVCTLEIRKPSPYDGGTYCCKAVNDLGTVEIECKLEVKVIAQ

SEQ ID NO: 84 - DNA, 17 bp, Artificial Sequence
  MYBPC1_forward primer
tcccagctgtccatctt

SEQ ID NO: 85 - DNA, 20 bp, Artificial Sequence
  MYCBPC1
cagccttgactttggctatg

SEQ ID NO: 86 - DNA, 26 bp, Artificial Sequence
  MYCBPC1_reverse primer
caaggaggaacagtgaaagttggtga

SEQ ID NO: 87 - DNA, 563 bp, Homo sapiens
gccacttctcttcccttcattcttcgccaggctctctgctgactcaagttcttcagttcacgatcttctagttgcagcgatgagtgcacgagtgagatcaagatccagaggaagaggagatggtcaggaggctcccgatgtggttgcattcgtggctcccggtgaatctcagcaagaggaaccaccaactgacaatcaggatattgaacctggacaagagagagaaggaacacctccgatcgaagaacgtaaagtagaaggtgattgccaggaaatggatctggaaaagactcggagtgagcgtggagatggctctgatgtaaaagagaagactccacctaatcctaagcatgctaagactaaagaagcaggagatgggcagccataagttaaaaagaagacaagctgaagctacacacatggctgatgtcacattgaaaatgtgactgaaaatttgaaaattctctcaataaagtttgagttttctctgaagaagtcatgcgtgtcttttgtaaaatttattcctaggaaattgacactattgtaaatggtatctttaaaaa

SEQ ID NO: 88 - protein, 102 aa, Homo sapiens
MSARVRSRSRGRGDGQEAPDVVAFVAPGESQQEEPPTDNQDIEPGQEREGTPPIEERKVEGDCQEMDLEKTRSERGDGSDVKEKTPPNPKHAKTKEAGDGQP

SEQ ID NO: 89 - DNA, 17 bp, Artificial Sequence
  PAGE4_forward primer
gaaggaacacctccgat

SEQ ID NO: 90 - DNA, 20 bp, Artificial Sequence
  PAG1_reverse primer
catctccacgctcactccga

SEQ ID NO: 91 - DNA, 25 bp, Artificial Sequence
  PAGE1 probe
aggtgattgccaggaaatggatctg

SEQ ID NO: 92 - DNA, 2446 bp, Homo sapiens
tccataaaggggttgcgggggccgcgctctcttctgggagggcagcggccaccggcgaggaacacggcgcgatgcaggttcagtgccagcagagcccagtgctggcaggcagcgccactttggtcgcccttggggcactggccttgtacgtcgcgaagccctccggctacgggaagcacacggagagcctgaagccggcggctacccgcctgccagcccgcgccgcctggttcctgcaggagctgccttccttcgcggtgcccgcggggatcctcgcccggcagcccctctccctcttcgggccacctgggacggtacttctgggcctcttctgcctacattacttccacaggacatttgtgtactcactgctcaatcgagggaggccttatccagctatactcattctcagaggcactgccttctgcactggaaatggagtccttcaaggctactatctgatttactgtgctgaataccctgatgggtggtacacagacatacggtttagcttgggtgtcttcttatttattttgggaatgggaataaacattcatagtgactatatattgcgccagctcaggaagcctggagaaatcagctacaggattccacaaggtggcttgtttacgtatgtttctggagccaatttcctcggtgagatcattgaatggatcggctatgccctggccacttggtccctcccagcacttgcatttgcatttttctcactttgtttccttgggctgcgagcttttcaccaccataggttctacctcaagatgtttgaggactaccccaaatctcggaaagcccttattccattcatcttttaaaggaaccaaattaaaaaggagcagagctcccacaatgctgatgaaaactgtcaagctgctgaaactgtaattttcatgatataatagtcccgtatatatgtaatagtaggtctcctggcgttctgccagctggcctggggattctgagtggtgtctgcttagagtttactcctacccttccagggacccctatcctgatccccaactgaagcttcaaaaagccacttttccaaatggcgacagttgcttcttagctattgctctgagaaagtacaaacttctcctatgtctttcaccgggcaatccaagtacatgtggcttcatacccactccctgtcaatgcaggacaactctgtaatcaagaattttttgacttgaaggcagtacttatagaccttattaaaggtatgcattttatacatgtaacagagtagcagaaatttaaactctgaagccacaaagacccagagcaaacccactcccaaatgaaaaccccagtcatggcttcctttttcttggttaattaggaaagatgagaaattattaggtagaccttgaatacaggagccctctcctcatagtgctgaaaagatactgatgcattgacctcatttcaaatttgtgcagtgtcttagttgatgagtgcctctgttttccagaagatttcacaatccccggaaaactggtatggctattcttgaaggccaggttttaataaccacaaacaaaaaggcatgaacctgggtggcttatgagagagtagagaacaacatgaccctggatggctactaagaggatagagaacagttttacaatagacattgcaaactctcatgtttttggaaactagtggcaatatccaaataatgagtagtgtaaaacaaagagaattaatgatgaggttacatgctgcttgcctccaccagatgtccacaacaatatgaagtacagcagaagccccaagcaactttcctttcctggagcttcttccttgtagttctcaggacctgttcaagaaggtgtctcctaggggcagcctgaatgcctccctcaaaggacctgcaggcagagactgaaaattgcagacagaggggcacgtctgggcagaaaacctgttttgtttggctcagacatatagttttttttttttttacaaagtttcaaaaacttaaaaatcaggagattccttcataaaactctagcattctagtttcatttaaaaagttggaggatctgaacatacagagcccacatttccacaccagaactggaactacgtagctagtaagcatttgagtttgcaaactcttgtgaaggggtcaccccagcatgagtgctgagatatggactctctaaggaaggggccgaacgcttgtaattggaatacatggaaatatttgtcttctcaggcctatgtttgcggaatgcattgtcaatatttagcaaactgttttgacaaatgagcaccagtggtactaagcacagaaactcactatataagtcacataggaaacttgaaaggtctgaggatgatgtagattactgaaaaatgcaaattgcaatcatataaataagtgtttttgttgttcattaaatacctttaaatcatg

SEQ ID NO: 93 - protein, 254 aa, Homo sapiens
MQVQCQQSPVLAGSATLVALGALALYVAKPSGYGKHTESLKPAATRLPARAAWFLQELPSFAVPAGILARQPLSLFGPPGTVLLGLFCLHYFHRTFVYSLLNRGRPYPAILILRGTAFCTGNGVLQGYYLIYCAEYPDGWYTDIRFSLGVFLFILGMGINIHSDYILRQLRKPGEISYRIPQGGLFTYVSGANFLGEIIEWIGYALATWSLPALAFAFFSLCFLGLRAFHHHRFYLKMFEDYPKSRKALIPFIF

SEQ ID NO: 94 - DNA, 21 bp, Artificial Sequence
  SRD5A2_forward primer
ggcctcttctgcctacattac

SEQ ID NO: 95 - DNA, 24 bp, Artificial Sequence
  SRD5A2_reverse primer
cagtgcctctgagaatgagtatag

SEQ ID NO: 96 - DNA, 22 bp, Artificial Sequence
  SRD5A2
ctcactgctcaatcgagggagg

SEQ ID NO: 97 - DNA, 5927 bp, Homo sapiens
tcgtcggagcagacgggagtttctcctcggggtcggagcaggaggcacgcggagtgtgaggccacgcatgagcggacgctaaccccctccccagccacaaagagtctacatgtctagggtctagacatgttcagctttgtggacctccggctcctgctcctcttagcggccaccgccctcctgacgcacggccaagaggaaggccaagtcgagggccaagacgaagacatcccaccaatcacctgcgtacagaacggcctcaggtaccatgaccgagacgtgtggaaacccgagccctgccggatctgcgtctgcgacaacggcaaggtgttgtgcgatgacgtgatctgtgacgagaccaagaactgccccggcgccgaagtccccgagggcgagtgctgtcccgtctgccccgacggctcagagtcacccaccgaccaagaaaccaccggcgtcgagggacccaagggagacactggcccccgaggcccaaggggacccgcaggcccccctggccgagatggcatccctggacagcctggacttcccggaccccccggaccccccggacctcccggaccccctggcctcggaggaaactttgctccccagctgtcttatggctatgatgagaaatcaaccggaggaatttccgtgcctggccccatgggtccctctggtcctcgtggtctccctggcccccctggtgcacctggtccccaaggcttccaaggtccccctggtgagcctggcgagcctggagcttcaggtcccatgggtccccgaggtcccccaggtccccctggaaagaatggagatgatggggaagctggaaaacctggtcgtcctggtgagcgtgggcctcctgggcctcagggtgctcgaggattgcccggaacagctggcctccctggaatgaagggacacagaggtttcagtggtttggatggtgccaagggagatgctggtcctgctggtcctaagggtgagcctggcagccctggtgaaaatggagctcctggtcagatgggcccccgtggcctgcctggtgagagaggtcgccctggagcccctggccctgctggtgctcgtggaaatgatggtgctactggtgctgccgggccccctggtcccaccggccccgctggtcctcctggcttccctggtgctgttggtgctaagggtgaagctggtccccaagggccccgaggctctgaaggtccccagggtgtgcgtggtgagcctggcccccctggccctgctggtgctgctggccctgctggaaaccctggtgctgatggacagcctggtgctaaaggtgccaatggtgctcctggtattgctggtgctcctggcttccctggtgcccgaggcccctctggaccccagggccccggcggccctcctggtcccaagggtaacagcggtgaacctggtgctcctggcagcaaaggagacactggtgctaagggagagcctggccctgttggtgttcaaggaccccctggccctgctggagaggaaggaaagcgaggagctcgaggtgaacccggacccactggcctgcccggaccccctggcgagcgtggtggacctggtagccgtggtttccctggcgcagatggtgttgctggtcccaagggtcccgctggtgaacgtggttctcctggccctgctggccccaaaggatctcctggtgaagctggtcgtcccggtgaagctggtctgcctggtgccaagggtctgactggaagccctggcagccctggtcctgatggcaaaactggcccccctggtcccgccggtcaagatggtcgccccggacccccaggcccacctggtgcccgtggtcaggctggtgtgatgggattccctggacctaaaggtgctgctggagagcccggcaaggctggagagcgaggtgttcccggaccccctggcgctgtcggtcctgctggcaaagatggagaggctggagctcagggaccccctggccctgctggtcccgctggcgagagaggtgaacaaggccctgctggctcccccggattccagggtctccctggtcctgctggtcctccaggtgaagcaggcaaacctggtgaacagggtgttcctggagaccttggcgcccctggcccctctggagcaagaggcgagagaggtttccctggcgagcgtggtgtgcaaggtccccctggtcctgctggtccccgaggggccaacggtgctcccggcaacgatggtgctaagggtgatgctggtgcccctggagctcccggtagccagggcgcccctggccttcagggaatgcctggtgaacgtggtgcagctggtcttccagggcctaagggtgacagaggtgatgctggtcccaaaggtgctgatggctctcctggcaaagatggcgtccgtggtctgactggccccattggtcctcctggccctgctggtgcccctggtgacaagggtgaaagtggtcccagcggccctgctggtcccactggagctcgtggtgcccccggagaccgtggtgagcctggtccccccggccctgctggctttgctggcccccctggtgctgacggccaacctggtgctaaaggcgaacctggtgatgctggtgctaaaggcgatgctggtccccctggccctgccggacccgctggaccccctggccccattggtaatgttggtgctcctggagccaaaggtgctcgcggcagcgctggtccccctggtgctactggtttccctggtgctgctggccgagtcggtcctcctggcccctctggaaatgctggaccccctggccctcctggtcctgctggcaaagaaggcggcaaaggtccccgtggtgagactggccctgctggacgtcctggtgaagttggtccccctggtccccctggccctgctggcgagaaaggatcccctggtgctgatggtcctgctggtgctcctggtactcccgggcctcaaggtattgctggacagcgtggtgtggtcggcctgcctggtcagagaggagagagaggcttccctggtcttcctggcccctctggtgaacctggcaaacaaggtccctctggagcaagtggtgaacgtggtccccctggtcccatgggcccccctggattggctggaccccctggtgaatctggacgtgagggggctcctggtgccgaaggttcccctggacgagacggttctcctggcgccaagggtgaccgtggtgagaccggccccgctggaccccctggtgctcctggtgctcctggtgcccctggccccgttggccctgctggcaagagtggtgatcgtggtgagactggtcctgctggtcccgccggtcctgtcggccctgttggcgcccgtggccccgccggaccccaaggcccccgtggtgacaagggtgagacaggcgaacagggcgacagaggcataaagggtcaccgtggcttctctggcctccagggtccccctggccctcctggctctcctggtgaacaaggtccctctggagcctctggtcctgctggtccccgaggtccccctggctctgctggtgctcctggcaaagatggactcaacggtctccctggccccattgggccccctggtcctcgcggtcgcactggtgatgctggtcctgttggtccccccggccctcctggacctcctggtccccctggtcctcccagcgctggtttcgacttcagcttcctgccccagccacctcaagagaaggctcacgatggtggccgctactaccgggctgatgatgccaatgtggttcgtgaccgtgacctcgaggtggacaccaccctcaagagcctgagccagcagatcgagaacatccggagcccagagggcagccgcaagaaccccgcccgcacctgccgtgacctcaagatgtgccactctgactggaagagtggagagtactggattgaccccaaccaaggctgcaacctggatgccatcaaagtcttctgcaacatggagactggtgagacctgcgtgtaccccactcagcccagtgtggcccagaagaactggtacatcagcaagaaccccaaggacaagaggcatgtctggttcggcgagagcatgaccgatggattccagttcgagtatggcggccagggctccgaccctgccgatgtggccatccagctgaccttcctgcgcctgatgtccaccgaggcctcccagaacatcacctaccactgcaagaacagcgtggcctacatggaccagcagactggcaacctcaagaaggccctgctcctccagggctccaacgagatcgagatccgcgccgagggcaacagccgcttcacctacagcgtcactgtcgatggctgcacgagtcacaccggagcctggggcaagacagtgattgaatacaaaaccaccaagacctcccgcctgcccatcatcgatgtggcccccttggacgttggtgccccagaccaggaattcggcttcgacgttggccctgtctgcttcctgtaaactccctccatcccaacctggctccctcccacccaaccaactttccccccaacccggaaacagacaagcaacccaaactgaaccccctcaaaagccaaaaaatgggagacaatttcacatggactttggaaaatatttttttcctttgcattcatctctcaaacttagtttttatctttgaccaaccgaacatgaccaaaaaccaaaagtgcattcaaccttaccaaaaaaaaaaaaaaaaaaagaataaataaataactttttaaaaaaggaagcttggtccacttgcttgaagacccatgcgggggtaagtccctttctgcccgttgggcttatgaaaccccaatgctgccctttctgctcctttctccacaccccccttggggcctcccctccactccttcccaaatctgtctccccagaagacacaggaaacaatgtattgtctgcccagcaatcaaaggcaatgctcaaacacccaagtggcccccaccctcagcccgctcctgcccgcccagcacccccaggccctgggggacctggggttctcagactgccaaagaagccttgccatctggcgctcccatggctcttgcaacatctccccttcgtttttgagggggtcatgccgggggagccaccagcccctcactgggttcggaggagagtcaggaagggccacgacaaagcagaaacatcggatttggggaacgcgtgtcaatcccttgtgccgcagggctgggcgggagagactgttctgttccttgtgtaactgtgttgctgaaagactacctcgttcttgtcttgatgtgtcaccggggcaactgcctgggggcggggatgggggcagggtggaagcggctccccattttataccaaaggtgctacatctatgtgatgggtggggtggggagggaatcactggtgctatagaaattgagatgcccccccaggccagcaaatgttcctttttgttcaaagtctatttttattccttgatatttttctttttttttttttttttttgtggatggggacttgtgaatttttctaaaggtgctatttaacatgggaggagagcgtgtgcggctccagcccagcccgctgctcactttccaccctctctccacctgcctctggcttctcaggcctctgctctccgacctctctcctctgaaaccctcctccacagctgcagcccatcctcccggctccctcctagtctgtcctgcgtcctctgtccccgggtttcagagacaacttcccaaagcacaaagcagtttttccccctaggggtgggaggaagcaaaagactctgtacctattttgtatgtgtataataatttgagatgtttttaattattttgattgctggaataaagcatgtggaaatgacccaaacataa

SEQ ID NO: 98 - protein, 1464 aa, Homo sapiens
MFSFVDLRLLLLLAATALLTHGQEEGQVEGQDEDIPPITCVQNGLRYHDRDVWKPEPCRICVCDNGKVLCDDVICDETKNCPGAEVPEGECCPVCPDGSESPTDQETTGVEGPKGDTGPRGPRGPAGPPGRDGIPGQPGLPGPPGPPGPPGPPGLGGNFAPQLSYGYDEKSTGGISVPGPMGPSGPRGLPGPPGAPGPQGFQGPPGEPGEPGASGPMGPRGPPGPPGKNGDDGEAGKPGRPGERGPPGPQGARGLPGTAGLPGMKGHRGFSGLDGAKGDAGPAGPKGEPGSPGENGAPGQMGPRGLPGERGRPGAPGPAGARGNDGATGAAGPPGPTGPAGPPGFPGAVGAKGEAGPQGPRGSEGPQGVRGEPGPPGPAGAAGPAGNPGADGQPGAKGANGAPGIAGAPGFPGARGPSGPQGPGGPPGPKGNSGEPGAPGSKGDTGAKGEPGPVGVQGPPGPAGEEGKRGARGEPGPTGLPGPPGERGGPGSRGFPGADGVAGPKGPAGERGSPGPAGPKGSPGEAGRPGEAGLPGAKGLTGSPGSPGPDGKTGPPGPAGQDGRPGPPGPPGARGQAGVMGFPGPKGAAGEPGKAGERGVPGPPGAVGPAGKDGEAGAQGPPGPAGPAGERGEQGPAGSPGFQGLPGPAGPPGEAGKPGEQGVPGDLGAPGPSGARGERGFPGERGVQGPPGPAGPRGANGAPGNDGAKGDAGAPGAPGSQGAPGLQGMPGERGAAGLPGPKGDRGDAGPKGADGSPGKDGVRGLTGPIGPPGPAGAPGDKGESGPSGPAGPTGARGAPGDRGEPGPPGPAGFAGPPGADGQPGAKGEPGDAGAKGDAGPPGPAGPAGPPGPIGNVGAPGAKGARGSAGPPGATGFPGAAGRVGPPGPSGNAGPPGPPGPAGKEGGKGPRGETGPAGRPGEVGPPGPPGPAGEKGSPGADGPAGAPGTPGPQGIAGQRGVVGLPGQRGERGFPGLPGPSGEPGKQGPSGASGERGPPGPMGPPGLAGPPGESGREGAPGAEGSPGRDGSPGAKGDRGETGPAGPPGAPGAPGAPGPVGPAGKSGDRGETGPAGPAGPVGPVGARGPAGPQGPRGDKGETGEQGDRGIKGHRGFSGLQGPPGPPGSPGEQGPSGASGPAGPRGPPGSAGAPGKDGLNGLPGPIGPPGPRGRTGDAGPVGPPGPPGPPGPPGPPSAGFDFSFLPQPPQEKAHDGGRYYRADDANVVRDRDLEVDTTLKSLSQQIENIRSPEGSRKNPARTCRDLKMCHSDWKSGEYWIDPNQGCNLDAIKVFCNMETGETCVYPTQPSVAQKNWYISKNPKDKRHVWFGESMTDGFQFEYGGQGSDPADVAIQLTFLRLMSTEASQNITYHCKNSVAYMDQQTGNLKKALLLQGSNEIEIRAEGNSRFTYSVTVDGCTSHTGAWGKTVIEYKTTKTSRLPIIDVAPLDVGAPDQEFGFDVGPVCFL

SEQ ID NO: 99 - DNA, 20 bp, Artificial Sequence
  COL1A1_forward primer
gaagacatcccaccaatcac

SEQ ID NO: 100 - DNA, 18 bp, Artificial Sequence
  COL1A1_reverse primer
cgggtttccacacgtctc

SEQ ID NO: 101 - DNA, 24 bp, Artificial Sequence
  COL1A1 probe
ctgcgtacagaacggcctcaggta

SEQ ID NO: 102 - DNA, 5490 bp, Homo sapiens
ggctgagttttatgacgggcccggtgctgaagggcagggaacaacttgatggtgctactttgaactgcttttcttttctcctttttgcacaaagagtctcatgtctgatatttagacatgatgagctttgtgcaaaaggggagctggctacttctcgctctgcttcatcccactattattttggcacaacaggaagctgttgaaggaggatgttcccatcttggtcagtcctatgcggatagagatgtctggaagccagaaccatgccaaatatgtgtctgtgactcaggatccgttctctgcgatgacataatatgtgacgatcaagaattagactgccccaacccagaaattccatttggagaatgttgtgcagtttgcccacagcctccaactgctcctactcgccctcctaatggtcaaggacctcaaggccccaagggagatccaggccctcctggtattcctgggagaaatggtgaccctggtattccaggacaaccagggtcccctggttctcctggcccccctggaatctgtgaatcatgccctactggtcctcagaactattctccccagtatgattcatatgatgtcaagtctggagtagcagtaggaggactcgcaggctatcctggaccagctggccccccaggccctcccggtccccctggtacatctggtcatcctggttcccctggatctccaggataccaaggaccccctggtgaacctgggcaagctggtccttcaggccctccaggacctcctggtgctataggtccatctggtcctgctggaaaagatggagaatcaggtagacccggacgacctggagagcgaggattgcctggacctccaggtatcaaaggtccagctgggatacctggattccctggtatgaaaggacacagaggcttcgatggacgaaatggagaaaagggtgaaacaggtgctcctggattaaagggtgaaaatggtcttccaggcgaaaatggagctcctggacccatgggtccaagaggggctcctggtgagcgaggacggccaggacttcctggggctgcaggtgctcggggtaatgacggtgctcgaggcagtgatggtcaaccaggccctcctggtcctcctggaactgccggattccctggatcccctggtgctaagggtgaagttggacctgcagggtctcctggttcaaatggtgcccctggacaaagaggagaacctggacctcagggacacgctggtgctcaaggtcctcctggccctcctgggattaatggtagtcctggtggtaaaggcgaaatgggtcccgctggcattcctggagctcctggactgatgggagcccggggtcctccaggaccagccggtgctaatggtgctcctggactgcgaggtggtgcaggtgagcctggtaagaatggtgccaaaggagagcccggaccacgtggtgaacgcggtgaggctggtattccaggtgttccaggagctaaaggcgaagatggcaaggatggatcacctggagaacctggtgcaaatgggcttccaggagctgcaggagaaaggggtgcccctgggttccgaggacctgctggaccaaatggcatcccaggagaaaagggtcctgctggagagcgtggtgctccaggccctgcagggcccagaggagctgctggagaacctggcagagatggcgtccctggaggtccaggaatgaggggcatgcccggaagtccaggaggaccaggaagtgatgggaaaccagggcctcccggaagtcaaggagaaagtggtcgaccaggtcctcctgggccatctggtccccgaggtcagcctggtgtcatgggcttccccggtcctaaaggaaatgatggtgctcctggtaagaatggagaacgaggtggccctggaggacctggccctcagggtcctcctggaaagaatggtgaaactggacctcagggacccccagggcctactgggcctggtggtgacaaaggagacacaggaccccctggtccacaaggattacaaggcttgcctggtacaggtggtcctccaggagaaaatggaaaacctggggaaccaggtccaaagggtgatgccggtgcacctggagctccaggaggcaagggtgatgctggtgcccctggtgaacgtggacctcctggattggcaggggccccaggacttagaggtggagctggtccccctggtcccgaaggaggaaagggtgctgctggtcctcctgggccacctggtgctgctggtactcctggtctgcaaggaatgcctggagaaagaggaggtcttggaagtcctggtccaaagggtgacaagggtgaaccaggcggtccaggtgctgatggtgtcccagggaaagatggcccaaggggtcctactggtcctattggtcctcctggcccagctggccagcctggagataagggtgaaggtggtgcccccggacttccaggtatagctggacctcgtggtagccctggtgagagaggtgaaactggccctccaggacctgctggtttccctggtgctcctggacagaatggtgaacctggtggtaaaggagaaagaggggctccgggtgagaaaggtgaaggaggccctcctggagttgcaggaccccctggaggttctggacctgctggtcctcctggtccccaaggtgtcaaaggtgaacgtggcagtcctggtggacctggtgctgctggcttccctggtgctcgtggtcttcctggtcctcctggtagtaatggtaacccaggacccccaggtcccagcggttctccaggcaaggatgggcccccaggtcctgcgggtaacactggtgctcctggcagccctggagtgtctggaccaaaaggtgatgctggccaaccaggagagaagggatcgcctggtgcccagggcccaccaggagctccaggcccacttgggattgctgggatcactggagcacggggtcttgcaggaccaccaggcatgccaggtcctaggggaagccctggccctcagggtgtcaagggtgaaagtgggaaaccaggagctaacggtctcagtggagaacgtggtccccctggaccccagggtcttcctggtctggctggtacagctggtgaacctggaagagatggaaaccctggatcagatggtcttccaggccgagatggatctcctggtggcaagggtgatcgtggtgaaaatggctctcctggtgcccctggcgctcctggtcatccaggcccacctggtcctgtcggtccagctggaaagagtggtgacagaggagaaagtggccctgctggccctgctggtgctcccggtcctgctggttcccgaggtgctcctggtcctcaaggcccacgtggtgacaaaggtgaaacaggtgaacgtggagctgctggcatcaaaggacatcgaggattccctggtaatccaggtgccccaggttctccaggccctgctggtcagcagggtgcaatcggcagtccaggacctgcaggccccagaggacctgttggacccagtggacctcctggcaaagatggaaccagtggacatccaggtcccattggaccaccagggcctcgaggtaacagaggtgaaagaggatctgagggctccccaggccacccagggcaaccaggccctcctggacctcctggtgcccctggtccttgctgtggtggtgttggagccgctgccattgctgggattggaggtgaaaaagctggcggttttgccccgtattatggagatgaaccaatggatttcaaaatcaacaccgatgagattatgacttcactcaagtctgttaatggacaaatagaaagcctcattagtcctgatggttctcgtaaaaaccccgctagaaactgcagagacctgaaattctgccatcctgaactcaagagtggagaatactgggttgaccctaaccaaggatgcaaattggatgctatcaaggtattctgtaatatggaaactggggaaacatgcataagtgccaatcctttgaatgttccacggaaacactggtggacagattctagtgctgagaagaaacacgtttggtttggagagtccatggatggtggttttcagtttagctacggcaatcctgaacttcctgaagatgtccttgatgtgcagctggcattccttcgacttctctccagccgagcttcccagaacatcacatatcactgcaaaaatagcattgcatacatggatcaggccagtggaaatgtaaagaaggccctgaagctgatggggtcaaatgaaggtgaattcaaggctgaaggaaatagcaaattcacctacacagttctggaggatggttgcacgaaacacactggggaatggagcaaaacagtctttgaatatcgaacacgcaaggctgtgagactacctattgtagatattgcaccctatgacattggtggtcctgatcaagaatttggtgtggacgttggccctgtttgctttttataaaccaaactctatctgaaatcccaacaaaaaaaatttaactccatatgtgttcctcttgttctaatcttgtcaaccagtgcaagtgaccgacaaaattccagttatttatttccaaaatgtttggaaacagtataatttgacaaagaaaaatgatacttctctttttttgctgttccaccaaatacaattcaaatgctttttgttttatttttttaccaattccaatttcaaaatgtctcaatggtgctataataaataaacttcaacactctttatgataacaacactgtgttatattctttgaatcctagcccatctgcagagcaatgactgtgctcaccagtaaaagataacctttctttctgaaatagtcaaatacgaaattagaaaagccctccctattttaactacctcaactggtcagaaacacagattgtattctatgagtcccagaagatgaaaaaaattttatacgttgataaaacttataaatttcattgattaatctcctggaagattggtttaaaaagaaaagtgtaatgcaagaatttaaagaaatatttttaaagccacaattattttaatattggatatcaactgcttgtaaaggtgctcctcttttttcttgtcattgctggtcaagattactaatatttgggaaggctttaaagacgcatgttatggtgctaatgtactttcacttttaaactctagatcagaattgttgacttgcattcagaacataaatgcacaaaatctgtacatgtctcccatcagaaagattcattggcatgccacaggggattctcctccttcatcctgtaaaggtcaacaataaaaaccaaattatggggctgcttttgtcacactagcatagagaatgtgttgaaatttaactttgtaagcttgtatgtggttgttgatcttttttttccttacagacacccataataaaatatcatattaaaattc

SEQ ID NO: 103 - protein, 1466 aa, Homo sapiens
MMSFVQKGSWLLLALLHPTIILAQQEAVEGGCSHLGQSYADRDVWKPEPCQICVCDSGSVLCDDIICDDQELDCPNPEIPFGECCAVCPQPPTAPTRPPNGQGPQGPKGDPGPPGIPGRNGDPGIPGQPGSPGSPGPPGICESCPTGPQNYSPQYDSYDVKSGVAVGGLAGYPGPAGPPGPPGPPGTSGHPGSPGSPGYQGPPGEPGQAGPSGPPGPPGAIGPSGPAGKDGESGRPGRPGERGLPGPPGIKGPAGIPGFPGMKGHRGFDGRNGEKGETGAPGLKGENGLPGENGAPGPMGPRGAPGERGRPGLPGAAGARGNDGARGSDGQPGPPGPPGTAGFPGSPGAKGEVGPAGSPGSNGAPGQRGEPGPQGHAGAQGPPGPPGINGSPGGKGEMGPAGIPGAPGLMGARGPPGPAGANGAPGLRGGAGEPGKNGAKGEPGPRGERGEAGIPGVPGAKGEDGKDGSPGEPGANGLPGAAGERGAPGFRGPAGPNGIPGEKGPAGERGAPGPAGPRGAAGEPGRDGVPGGPGMRGMPGSPGGPGSDGKPGPPGSQGESGRPGPPGPSGPRGQPGVMGFPGPKGNDGAPGKNGERGGPGGPGPQGPPGKNGETGPQGPPGPTGPGGDKGDTGPPGPQGLQGLPGTGGPPGENGKPGEPGPKGDAGAPGAPGGKGDAGAPGERGPPGLAGAPGLRGGAGPPGPEGGKGAAGPPGPPGAAGTPGLQGMPGERGGLGSPGPKGDKGEPGGPGADGVPGKDGPRGPTGPIGPPGPAGQPGDKGEGGAPGLPGIAGPRGSPGERGETGPPGPAGFPGAPGQNGEPGGKGERGAPGEKGEGGPPGVAGPPGGSGPAGPPGPQGVKGERGSPGGPGAAGFPGARGLPGPPGSNGNPGPPGPSGSPGKDGPPGPAGNTGAPGSPGVSGPKGDAGQPGEKGSPGAQGPPGAPGPLGIAGITGARGLAGPPGMPGPRGSPGPQGVKGESGKPGANGLSGERGPPGPQGLPGLAGTAGEPGRDGNPGSDGLPGRDGSPGGKGDRGENGSPGAPGAPGHPGPPGPVGPAGKSGDRGESGPAGPAGAPGPAGSRGAPGPQGPRGDKGETGERGAAGIKGHRGFPGNPGAPGSPGPAGQQGAIGSPGPAGPRGPVGPSGPPGKDGTSGHPGPIGPPGPRGNRGERGSEGSPGHPGQPGPPGPPGAPGPCCGGVGAAAIAGIGGEKAGGFAPYYGDEPMDFKINTDEIMTSLKSVNGQIESLISPDGSRKNPARNCRDLKFCHPELKSGEYWVDPNQGCKLDAIKVFCNMETGETCISANPLNVPRKHWWTDSSAEKKHVWFGESMDGGFQFSYGNPELPEDVLDVQLAFLRLLSSRASQNITYHCKNSIAYMDQASGNVKKALKLMGSNEGEFKAEGNSKFTYTVLEDGCTKHTGEWSKTVFEYRTRKAVRLPIVDIAPYDIGGPDQEFGVDVGPVCFL

SEQ ID NO: 104 - DNA, 17 bp, Artificial Sequence
  COL3A1
gaggacggccaggactt

SEQ ID NO: 105 - DNA, 19 bp, Artificial Sequence
  COL3A1
ggtccaacttcacccttag

SEQ ID NO: 106 - DNA, 21 bp, Artificial Sequence
  COL3A1 probe
agtgatggtcaaccaggccct

SEQ ID NO: 107 - DNA, 6930 bp, Homo sapiens
gaccgttgcttggcagacactggatggttatgagcctgaacaagctgaaaaggggcaggaaaagaagtggaggcagcattcttcctatttaaagctgcatcgcttgaaaaaagttttcgcagactgtgctggagctggtgctgaaaaagggggtttgcagaggctgccctggggctggtgctgaaagaagagcccacagctgacttcatggtgctacaataacctcagaatctacttttcactctcaggagaacccacatgtctaatatttagacatgatggcaaactgggcggaagcaagacctctcctcattcttattgttttattagggcaatttgtctcaataaaagcccaggaagaagacgaggatgaaggatatggtgaagaaatagcctgcactcagaatggccagatgtacttaaacagggacatttggaaacctgccccttgtcagatctgtgtctgtgacaatggagccattctctgtgacaagatagaatgccaggatgtgctggactgtgccgaccctgtaacgccccctggggaatgctgtcctgtctgttcacaaacacctggaggtggcaatacaaattttggtagaggaagaaagggacaaaagggagaaccaggattagtgcctgttgtaacaggcatacgtggtcgtccaggaccggcaggacctccaggatcacagggaccaagaggagagcgagggccaaaaggaagacctggccctcgtggacctcagggaattgatggagaaccaggtgttcctggtcaacctggtgctccaggacctcctggacatccgtcccacccaggacccgatggcttgagcaggccgttttcagctcaaatggctgggttggatgaaaaatctggacttgggagtcaagtaggactaatgcctggctctgtgggtcctgttggcccaaggggaccacagggtttacaaggacagcaaggtggtgcaggacctacaggacctcctggtgaacctggtgatcctggaccaatgggtccgattggttcacgtggaccagagggccctcctggtaaacctggggaagatggtgaacctggcagaaatggaaatcctggtgaagtgggatttgcaggatctccgggagctcgtggatttcctggggctcctggtcttccaggtctgaagggtcaccgaggacacaaaggtcttgaaggccctaaaggtgaagttggagcacctggttccaagggtgaagctggccccactggtccaatgggtgccatgggtcctctgggtccgaggggaatgccaggagagagagggagacttgggccacagggtgctcctggacaacgaggtgcacatggtatgcctggaaaacctggaccaatgggtcctcttgggataccaggctcttctggttttccaggaaatcctggaatgaagggagaagcaggtcctacaggggcgcgaggccctgaaggtcctcaggggcagagaggtgaaactgggcccccaggtccagttggctctccaggtcttcctggtgcaataggaactgatggtactcctggtgccaaaggcccaacgggctctccgggtacctctggtcctcctggctcagcagggcctcctggatctccaggacctcagggtagcactggtcctcagggaattcgaggccaaccgggtgatccaggagttccaggtttcaaaggagaagctggcccaaaaggggaaccagggccacatggtattcagggtccgataggcccacccggtgaagaaggcaaaagaggtcccagaggtgacccaggaacagttggtcctccagggccagtgggagaaaggggtgctcctggcaatcgtggttttccaggctctgatggtttacctgggccaaagggtgctcaaggagaacggggtcctgtaggttcttcaggacccaaaggaagccagggggatccaggacgtccaggggaacctgggcttccaggtgctcggggtttgacaggaaatcctggtgttcaaggtcctgaaggaaaacttggacctttgggtgcgccaggggaagatggccgtccaggtcctccaggctccataggaatcagagggcagcccgggagcatgggccttccaggccccaaaggtagcagtggtgaccctgggaaacctggagaagcaggaaatgctggagttcctgggcagaggggagctcctggaaaagatggtgaagttggtccttctggtcctgtgggcccgccgggtctagctggtgaaagaggagaacaaggacctccaggccccacaggttttcaggggcttcctggtcctccagggcctcctggagaaggtggaaaaccaggtgatcaaggtgttcctggagatcccggagcagttggcccgttaggacctagaggagaacgaggaaatcctggggaaagaggagaacctgggataactggactccctggtgagaagggaatggctggaggacatggtcctgatggcccaaaaggcagtccaggtccatctgggacccctggagatacaggcccaccaggtcttcaaggtatgccgggagaaagaggaattgcaggaactcctggccccaagggtgacagaggtggcataggagaaaaaggtgctgaaggcacagctggaaatgatggtgcaagaggtcttccaggtcctttgggccctccaggtccggcaggtcctactggagaaaagggtgaacctggtcctcgaggtttagttggccctcctggctcccggggcaatcctggttctcgaggtgaaaatgggccaactggagctgttggttttgccggaccccagggtcctgacggacagcctggagtaaaaggtgaacctggagagccaggacagaagggagatgctggttctcctggaccacaaggtttagcaggatcccctggccctcatggtcctaatggtgttcctggactaaaaggtggtcgaggaacccaaggtccgcctggtgctacaggatttcctggttctgcgggcagagttggacctccaggccctgctggagctccaggacctgcgggacccctaggggaacccgggaaggagggacctccaggtcttcgtggggaccctggctctcatgggcgtgtgggagatcgaggaccagctggcccccctggtggcccaggagacaaaggggacccaggagaagatgggcaacctggtccagatggcccccctggtccagctggaacgaccgggcagagaggaattgttggcatgcctgggcaacgtggagagagaggcatgcccggcctaccaggcccagcgggaacaccaggaaaagtaggaccaactggtgcaacaggagataaaggtccacctggacctgtggggcccccaggctccaatggtcctgtaggggaacctggaccagaaggtccagctggcaatgatggtaccccaggacgggatggtgctgttggagaacgtggtgatcgtggagaccctgggcctgcaggtctgccaggctctcagggtgcccctggaactcctggccctgtgggtgctccaggagatgcaggacaaagaggagatccgggttctcggggtcctataggaccacctggtcgagctgggaaacgtggattacctggaccccaaggacctcgtggtgacaaaggtgatcatggagaccgaggcgacagaggtcagaagggccacagaggctttactggtcttcagggtcttcctggccctcctggtccaaatggtgaacaaggaagtgctggaatccctggaccatttggcccaagaggtcctccaggcccagttggtccttcaggtaaagaaggaaaccctgggccacttgggccaattggacctccaggtgtacgaggcagtgtaggagaagcaggacctgagggccctcctggtgagcctggcccacctggccctccgggtccccctggccaccttacagctgctcttggggatatcatggggcactatgatgaaagcatgccagatccacttcctgagtttactgaagatcaggcggctcctgatgacaaaaacaaaacggacccaggggttcatgctaccctgaagtcactcagtagtcagattgaaaccatgcgcagccccgatggctcgaaaaagcacccagcccgcacgtgtgatgacctaaagctttgccattccgcaaagcagagtggtgaatactggattgatcctaaccaaggatctgttgaagatgcaatcaaagtttactgcaacatggaaacaggagaaacatgtatttcagcaaacccatccagtgtaccacgtaaaacctggtgggccagtaaatctcctgacaataaacctgtttggtatggtcttgatatgaacagagggtctcagttcgcttatggagaccaccaatcacctaatacagccattactcagatgacttttttgcgccttttatcaaaagaagcctcccagaacatcacttacatctgtaaaaacagtgtaggatacatggacgatcaagctaagaacctcaaaaaagctgtggttctcaaaggggcaaatgacttagatatcaaagcagagggaaatattagattccggtatatcgttcttcaagacacttgctctaagcggaatggaaatgtgggcaagactgtctttgaatatagaacacagaatgtggcacgcttgcccatcatagatcttgctcctgtggatgttggcggcacagaccaggaattcggcgttgaaattgggccagtttgttttgtgtaaagtaagccaagacacatcgacaatgagcaccaccatcaatgaccaccgccattcacaagaactttgactgtttgaagttgatcctgagactcttgaagtaatggctgatcctgcatcagcattgtatatatggtcttaagtgcctggcctccttatccttcagaatatttattttacttacaatcctcaagttttaattgattttaaatatttttcaatacaacagtttaggtttaagatgaccaatgacaatgaccacctttgcagaaagtaaactgattgaataaataaatctccgttttcttcaatttatttcagtgtaatgaaaaagttgcttagtatttatgaggaaattcttcttcctggcaggtagcttaaagagtggggtatatagagccacaacacatgtttattttgcttggctgcagttgaaaaatagaaattagtgcccttttgtgacctctcattccaagattgtcaattaaaaatgagtttaaaatgtttaacttgtgatcgagacctacatgcatgtcttgatattgtgtaactataatagagactctttaaggagaatcttaaaaaaaaaaaaacgtttctcactgtcttaaatagaatttttaaatagtatatattcagtggcattttggagaacaaagtgaatttacttcgacttcttaaatttttgtaaaagactataagtttagacatctttctcattcaaatttaaagatatctttctcctcttgatcaatctatcaatattgatagaagtcacactagtatataccatttaatacatttacactttcttatttaagaagatattgaatgcaaaataattgacatatagaactttacaaacatatgtccaaggactctaaattgagactcttccacatgtacaatctcatcatcctgaagcctataatgaagaaaaagatctagaaactgagttgtggagctgactctaatcaaatgtgatgattggaattagaccatttggcctttgaactttcataggaaaaatgacccaacatttcttagcatgagctacctcatctctagaagctgggatggacttactattcttgtttatattttagatactgaaaggtgctatgcttctgttattattccaagactggagataggcagggctaaaaaggtattattatttttcctttaatgatggtgctaaaattcttcctataaaattccttaaaaataaagatggtttaatcactaccattgtgaaaacataactgttagacttcccgtttctgaaagaaagagcatcgttccaatgcttgttcactgttcctctgtcatactgtatctggaatgctttgtaatacttgcatgcttcttagaccagaacatgtaggtccccttgtgtctcaatactttttttttcttaattgcatttgttggctctattttaatttttttcttttaaaataaacagctgggaccatcccaaaagacaagccatgcatacaactttggtcatgtatctctgcaaagcatcaaattaaatgcacgcttttgtcatgtcagtggtttttgttttgtgaaattcctttgaccatattagatctatttcatttccaatagtgaaaaggagatgtggtggtatactttgtttgccatttgtttaaaagatacaacggataccttctatcatgtatgtactggcttataaatgaaaatctatctacaacattacccacaaaggcaacatgacaccaattatcactgcctctgcccttaaaaatgtcagagtagtattattgataaaaagggcaagcaatagatttttcatgactgaataaactgtaataataaaacatatgtctcaaagtgtatcacatatgaatttagcctaattgttttcagtttcattctcaatatttagtttacaacatcattttcccctaaactggttatattttgacctgtatatcttaaatttgagtatttatatgcctaaatacatgtgtgagttttgtttgacttccaagtccaaactataagattatataagttcatatagatgaatcagaaatatgtggtaatactattaagtcacaaacactaacaatttccaactatagaaataacagttcttatttggattttgggaatgctaccaata

SEQ ID NO: 108 - protein, 1499 aa, Homo sapiens
MMANWAEARPLLILIVLLGQFVSIKAQEEDEDEGYGEEIACTQNGQMYLNRDIWKPAPCQICVCDNGAILCDKIECQDVLDCADPVTPPGECCPVCSQTPGGGNTNFGRGRKGQKGEPGLVPVVTGIRGRPGPAGPPGSQGPRGERGPKGRPGPRGPQGIDGEPGVPGQPGAPGPPGHPSHPGPDGLSRPFSAQMAGLDEKSGLGSQVGLMPGSVGPVGPRGPQGLQGQQGGAGPTGPPGEPGDPGPMGPIGSRGPEGPPGKPGEDGEPGRNGNPGEVGFAGSPGARGFPGAPGLPGLKGHRGHKGLEGPKGEVGAPGSKGEAGPTGPMGAMGPLGPRGMPGERGRLGPQGAPGQRGAHGMPGKPGPMGPLGIPGSSGFPGNPGMKGEAGPTGARGPEGPQGQRGETGPPGPVGSPGLPGAIGTDGTPGAKGPTGSPGTSGPPGSAGPPGSPGPQGSTGPQGIRGQPGDPGVPGFKGEAGPKGEPGPHGIQGPIGPPGEEGKRGPRGDPGTVGPPGPVGERGAPGNRGFPGSDGLPGPKGAQGERGPVGSSGPKGSQGDPGRPGEPGLPGARGLTGNPGVQGPEGKLGPLGAPGEDGRPGPPGSIGIRGQPGSMGLPGPKGSSGDPGKPGEAGNAGVPGQRGAPGKDGEVGPSGPVGPPGLAGERGEQGPPGPTGFQGLPGPPGPPGEGGKPGDQGVPGDPGAVGPLGPRGERGNPGERGEPGITGLPGEKGMAGGHGPDGPKGSPGPSGTPGDTGPPGLQGMPGERGIAGTPGPKGDRGGIGEKGAEGTAGNDGARGLPGPLGPPGPAGPTGEKGEPGPRGLVGPPGSRGNPGSRGENGPTGAVGFAGPQGPDGQPGVKGEPGEPGQKGDAGSPGPQGLAGSPGPHGPNGVPGLKGGRGTQGPPGATGFPGSAGRVGPPGPAGAPGPAGPLGEPGKEGPPGLRGDPGSHGRVGDRGPAGPPGGPGDKGDPGEDGQPGPDGPPGPAGTTGQRGIVGMPGQRGERGMPGLPGPAGTPGKVGPTGATGDKGPPGPVGPPGSNGPVGEPGPEGPAGNDGTPGRDGAVGERGDRGDPGPAGLPGSQGAPGTPGPVGAPGDAGQRGDPGSRGPIGPPGRAGKRGLPGPQGPRGDKGDHGDRGDRGQKGHRGFTGLQGLPGPPGPNGEQGSAGIPGPFGPRGPPGPVGPSGKEGNPGPLGPIGPPGVRGSVGEAGPEGPPGEPGPPGPPGPPGHLTAALGDIMGHYDESMPDPLPEFTEDQAAPDDKNKTDPGVHATLKSLSSQIETMRSPDGSKKHPARTCDDLKLCHSAKQSGEYWIDPNQGSVEDAIKVYCNMETGETCISANPSSVPRKTWWASKSPDNKPVWYGLDMNRGSQFAYGDHQSPNTAITQMTFLRLLSKEASQNITYICKNSVGYMDDQAKNLKKAVVLKGANDLDIKAEGNIRFRYIVLQDTCSKRNGNVGKTVFEYRTQNVARLPIIDLAPVDVGGTDQEFGVEIGPVCFV

SEQ ID NO: 109 - DNA, 20 bp, Artificial Sequence
  COL5A2
aagaggagaacaaggacctc

SEQ ID NO: 110 - DNA, 20 bp, Artificial Sequence
  COL5A2_reverse primer
atctccaggaacaccttgat

SEQ ID NO: 111 - DNA, 22 bp, Artificial Sequence
  COL5A2_probe
tttccaccttctccaggaggcc

SEQ ID NO: 112 - DNA, 2175 bp, Homo sapiens
agtacagtataaaacttcacagtgccaataccatgaagaggagctcagacagctcttaccacatgatacaagagccggctggtggaagagtggggaccagaaagagaatttgctgaagaggagaaggaaaaaaaaaacaccaaaaaaaaaaataaaaaaatccacacacacaaaaaaacctgcgcgtgaggggggaggaaaagcagggccttttaaaaaggcaatcacaacaacttttgctgccaggatgcccttgctttggctgagaggatttctgttggcaagttgctggattatagtgaggagttcccccaccccaggatccgaggggcacagcgcggcccccgactgtccgtcctgtgcgctggccgccctcccaaaggatgtacccaactctcagccagagatggtggaggccgtcaagaagcacattttaaacatgctgcacttgaagaagagacccgatgtcacccagccggtacccaaggcggcgcttctgaacgcgatcagaaagcttcatgtgggcaaagtcggggagaacgggtatgtggagatagaggatgacattggaaggagggcagaaatgaatgaacttatggagcagacctcggagatcatcacgtttgccgagtcaggaacagccaggaagacgctgcacttcgagatttccaaggaaggcagtgacctgtcagtggtggagcgtgcagaagtctggctcttcctaaaagtccccaaggccaacaggaccaggaccaaagtcaccatccgcctcttccagcagcagaagcacccgcagggcagcttggacacaggggaagaggccgaggaagtgggcttaaagggggagaggagtgaactgttgctctctgaaaaagtagtagacgctcggaagagcacctggcatgtcttccctgtctccagcagcatccagcggttgctggaccagggcaagagctccctggacgttcggattgcctgtgagcagtgccaggagagtggcgccagcttggttctcctgggcaagaagaagaagaaagaagaggagggggaagggaaaaagaagggcggaggtgaaggtggggcaggagcagatgaggaaaaggagcagtcgcacagacctttcctcatgctgcaggcccggcagtctgaagaccaccctcatcgccggcgtcggcggggcttggagtgtgatggcaaggtcaacatctgctgtaagaaacagttctttgtcagtttcaaggacatcggctggaatgactggatcattgctccctctggctatcatgccaactactgcgagggtgagtgcccgagccatatagcaggcacgtccgggtcctcactgtccttccactcaacagtcatcaaccactaccgcatgcggggccatagcccctttgccaacctcaaatcgtgctgtgtgcccaccaagctgagacccatgtccatgttgtactatgatgatggtcaaaacatcatcaaaaaggacattcagaacatgatcgtggaggagtgtgggtgctcatagagttgcccagcccagggggaaagggagcaagagttgtccagagaagacagtggcaaaatgaagaaatttttaaggtttctgagttaaccagaaaaatagaaattaaaaacaaaacaaaaaaaaaaacaaaaaaaaacaaaagtaaattaaaaacaaaacctgatgaaacagatgaaggaagatgtggaaaaaatccttagccagggctcagagatgaagcagtgaaagagacaggaattgggagggaaagggagaatggtgtaccctttatttcttctgaaatcacactgatgacatcagttgtttaaacggggtattgtcctttccccccttgaggttcccttgtgagccttgaatcaaccaatctagtctgcagtagtgtggactagaacaacccaaatagcatctagaaagccatgagtttgaaagggcccatcacaggcactttcctacccaattacccaggtcataaggtatgtctgtgtgacacttatctctgtgtatatcagcatacacacacacacacacacacacacacacacacacaggcatttccacacattacatatatacacatactggtaaaagaacaatcgtgtgcaggtggtcacacttcctttttctgtaccacttttgcaacaaaacaa

SEQ ID NO: 113 - protein, 426 aa, Homo sapiens
MPLLWLRGFLLASCWIIVRSSPTPGSEGHSAAPDCPSCALAALPKDVPNSQPEMVEAVKKHILNMLHLKKRPDVTQPVPKAALLNAIRKLHVGKVGENGYVEIEDDIGRRAEMNELMEQTSEIITFAESGTARKTLHFEISKEGSDLSVVERAEVWLFLKVPKANRTRTKVTIRLFQQQKHPQGSLDTGEEAEEVGLKGERSELLLSEKVVDARKSTWHVFPVSSSIQRLLDQGKSSLDVRIACEQCQESGASLVLLGKKKKKEEEGEGKKKGGGEGGAGADEEKEQSHRPFLMLQARQSEDHPHRRRRRGLECDGKVNICCKKQFFVSFKDIGWNDWIIAPSGYHANYCEGECPSHIAGTSGSSLSFHSTVINHYRMRGHSPFANLKSCCVPTKLRPMSMLYYDDGQNIIKKDIQNMIVEECGCS

SEQ ID NO: 114 - DNA, 20 bp, Artificial Sequence
  INHBA_forward primer
cctcggagatcatcacgttt

SEQ ID NO: 115 - DNA, 21 bp, Artificial Sequence
  INHBA_reverse primer
cactgccttccttggaaatct

SEQ ID NO: 116 - DNA, 22 bp, Artificial Sequence
  INHBA probe
cagccaggaagacgctgcactt

SEQ ID NO: 117 - DNA, 5898 bp, Homo sapiens
aaaagtgagtccctgccttccctctctccgtctggctcctcccaggcctgtctggcaggggccggggtgcaggaggaggagacggcatccagtacagaggggctggacttggacccctgcagcagccctgcacaggagaagcggcatataaagccgcgctgcccgggagccgctcggccacgtccaccggagcatcctgcactgcagggccggtctctcgctccagcagagcctgcgcctttctgactcggtccggaacactgaaaccagtcatcactgcatctttttggcaaaccaggagctcagctgcaggaggcaggatggtctggaggctggtcctgctggctctgtgggtgtggcccagcacgcaagctggtcaccaggacaaagacacgaccttcgaccttttcagtatcagcaacatcaaccgcaagaccattggcgccaagcagttccgcgggcccgaccccggcgtgccggcttaccgcttcgtgcgctttgactacatcccaccggtgaacgcagatgacctcagcaagatcaccaagatcatgcggcagaaggagggcttcttcctcacggcccagctcaagcaggacggcaagtccaggggcacgctgttggctctggagggccccggtctctcccagaggcagttcgagatcgtctccaacggccccgcggacacgctggatctcacctactggattgacggcacccggcatgtggtctccctggaggacgtcggcctggctgactcgcagtggaagaacgtcaccgtgcaggtggctggcgagacctacagcttgcacgtgggctgcgacctcatagacagcttcgctctggacgagcccttctacgagcacctgcaggcggaaaagagccggatgtacgtggccaaaggctctgccagagagagtcacttcaggggtttgcttcagaacgtccacctagtgtttgaaaactctgtggaagatattctaagcaagaagggttgccagcaaggccagggagctgagatcaacgccatcagtgagaacacagagacgctgcgcctgggtccgcatgtcaccaccgagtacgtgggccccagctcggagaggaggcccgaggtgtgcgaacgctcgtgcgaggagctgggaaacatggtccaggagctctcggggctccacgtcctcgtgaaccagctcagcgagaacctcaagagagtgtcgaatgataaccagtttctctgggagctcattggtggccctcctaagacaaggaacatgtcagcttgctggcaggatggccggttctttgcggaaaatgaaacgtgggtggtggacagctgcaccacgtgtacctgcaagaaatttaaaaccatttgccaccaaatcacctgcccgcctgcaacctgcgccagtccatcctttgtggaaggcgaatgctgcccttcctgcctccactcggtggacggtgaggagggctggtctccgtgggcagagtggacccagtgctccgtgacgtgtggctctgggacccagcagagaggccggtcctgtgacgtcaccagcaacacctgcttggggccctccatccagacacgggcttgcagtctgagcaagtgtgacacccgcatccggcaggacggcggctggagccactggtcaccttggtcttcatgctctgtgacctgtggagttggcaatatcacacgcatccgtctctgcaactccccagtgccccagatggggggcaagaattgcaaagggagtggccgggagaccaaagcctgccagggcgccccatgcccaatcgatggccgctggagcccctggtccccgtggtcggcctgcactgtcacctgtgccggtgggatccgggagcgcacccgggtctgcaacagccctgagcctcagtacggagggaaggcctgcgtgggggatgtgcaggagcgtcagatgtgcaacaagaggagctgccccgtggatggctgtttatccaacccctgcttcccgggagcccagtgcagcagcttccccgatgggtcctggtcatgcggctcctgccctgtgggcttcttgggcaatggcacccactgtgaggacctggacgagtgtgccctggtccccgacatctgcttctccaccagcaaggtgcctcgctgtgtcaacactcagcctggcttccactgcctgccctgcccgccccgatacagagggaaccagcccgtcggggtcggcctggaagcagccaagacggaaaagcaagtgtgtgagcccgaaaacccatgcaaggacaagacacacaactgccacaagcacgcggagtgcatctacctgggccacttcagcgaccccatgtacaagtgcgagtgccagacaggctacgcgggcgacgggctcatctgcggggaggactcggacctggacggctggcccaacctcaatctggtctgcgccaccaacgccacctaccactgcatcaaggataactgcccccatctgccaaattctgggcaggaagactttgacaaggacgggattggcgatgcctgtgatgatgacgatgacaatgacggtgtgaccgatgagaaggacaactgccagctcctcttcaatccccgccaggctgactatgacaaggatgaggttggggaccgctgtgacaactgcccttacgtgcacaaccctgcccagatcgacacagacaacaatggagagggtgacgcctgctccgtggacattgatggggacgatgtcttcaatgaacgagacaattgtccctacgtctacaacactgaccagagggacacggatggtgacggtgtgggggatcactgtgacaactgccccctggtgcacaaccctgaccagaccgacgtggacaatgaccttgttggggaccagtgtgacaacaacgaggacatagatgacgacggccaccagaacaaccaggacaactgcccctacatctccaacgccaaccaggctgaccatgacagagacggccagggcgacgcctgtgaccctgatgatgacaacgatggcgtccccgatgacagggacaactgccggcttgtgttcaacccagaccaggaggacttggacggtgatggacggggtgatatttgtaaagatgattttgacaatgacaacatcccagatattgatgatgtgtgtcctgaaaacaatgccatcagtgagacagacttcaggaacttccagatggtccccttggatcccaaagggaccacccaaattgatcccaactgggtcattcgccatcaaggcaaggagctggttcagacagccaactcggaccccggcatcgctgtaggttttgacgagtttgggtctgtggacttcagtggcacattctacgtaaacactgaccgggacgacgactatgccggcttcgtctttggttaccagtcaagcagccgcttctatgtggtgatgtggaagcaggtgacgcagacctactgggaggaccagcccacgcgggcctatggctactccggcgtgtccctcaaggtggtgaactccaccacggggacgggcgagcacctgaggaacgcgctgtggcacacggggaacacgccggggcaggtgcgaaccttatggcacgaccccaggaacattggctggaaggactacacggcctataggtggcacctgactcacaggcccaagactggctacatcagagtcttagtgcatgaaggaaaacaggtcatggcagactcaggacctatctatgaccaaacctacgctggcgggcggctgggtctatttgtcttctctcaagaaatggtctatttctcagacctcaagtacgaatgcagagatatttaaacaagatttgctgcatttccggcaatgccctgtgcatgccatggtccctagacacctcagttcattgtggtccttgtggcttctctctctagcagcacctcctgtcccttgaccttaactctgatggttcttcacctcctgccagcaaccccaaacccaagtgccttcagaggataaatatcaatggaactcagagatgaacatctaacccactagaggaaaccagtttggtgatatatgagactttatgtggagtgaaaattgggcatgccattacattgctttttcttgtttgtttaaaaagaatgacgtttacatataaaatgtaattacttattgtatttatgtgtatatggagttgaagggaatactgtgcataagccattatgataaattaagcatgaaaaatattgctgaactacttttggtgcttaaagttgtcactattcttgaattagagttgctctacaatgacacacaaatcccattaaataaattataaacaagggtcaattcaaatttgaagtaatgttttagtaaggagagattagaagacaacaggcatagcaaatgacataagctaccgattaactaatcggaacatgtaaaacagttacaaaaataaacgaactctcctcttgtcctacaatgaaagccctcatgtgcagtagagatgcagtttcatcaaagaacaaacatccttgcaaatgggtgtgacgcggttccagatgtggatttggcaaaacctcatttaagtaaaaggttagcagagcaaagtgcggtgctttagctgctgcttgtgccgctgtggcgtcggggaggctcctgcctgagcttccttccccagctttgctgcctgagaggaaccagagcagacgcacaggccggaaaaggcgcatctaacgcgtatctaggctttggtaactgcggacaagttgcttttacctgatttgatgatacatttcattaaggttccagttataaatattttgttaatatttattaagtgactatagaatgcaactccatttaccagtaacttattttaaatatgcctagtaacacatatgtagtataatttctagaaacaaacatctaataagtatataatcctgtgaaaatatgaggcttgataatattaggttgtcacgatgaagcatgctagaagctgtaacagaatacatagagaataatgaggagtttatgatggaaccttaaatatataatgttgccagcgattttagttcaatatttgttactgttatctatctgctgtatatggaattcttttaattcaaacgctgaaaagaatcagcatttagtcttgccaggcacacccaataatcagtcatgtgtaatatgcacaagtttgtttttgtttttgttttttttgttggttggtttgtttttttgctttaagttgcatgatctttctgcaggaaatagtcactcatcccactccacataaggggtttagtaagagaagtctgtctgtctgatgatggatagggggcaaatctttttcccctttctgttaatagtcatcacatttctatgccaaacaggaacaatccataactttagtcttaatgtacacattgcattttgataaaattaattttgttgtttcctttgaggttgatcgttgtgttgttgttttgctgcactttttacttttttgcgtgtggagctgtattcccgagaccaacgaagcgttgggatacttcattaaatgtagcgactgtcaacagcgtgcaggttttctgtttctgtgttgtggggtcaaccgtacaatggtgtgggagtgacgatgatgtgaatatttagaatgtaccatattttttgtaaattatttatgtttttctaaacaaatttatcgtataggttgatgaaacgtcatgtgttttgccaaagactgtaaatatttatttatgtgttcacatggtcaaaatttcaccactgaaaccctgcacttagctagaacctcatttttaaagattaacaacaggaaataaattgtaaaaaaggttttctatacatgaaaaaaaaaaaaaaaaaa

SEQ ID NO: 118 - protein, 1172 aa, Homo sapiens
MVWRLVLLALWVWPSTQAGHQDKDTTFDLFSISNINRKTIGAKQFRGPDPGVPAYRFVRFDYIPPVNADDLSKITKIMRQKEGFFLTAQLKQDGKSRGTLLALEGPGLSQRQFEIVSNGPADTLDLTYWIDGTRHVVSLEDVGLADSQWKNVTVQVAGETYSLHVGCDLIDSFALDEPFYEHLQAEKSRMYVAKGSARESHFRGLLQNVHLVFENSVEDILSKKGCQQGQGAEINAISENTETLRLGPHVTTEYVGPSSERRPEVCERSCEELGNMVQELSGLHVLVNQLSENLKRVSNDNQFLWELIGGPPKTRNMSACWQDGRFFAENETWVVDSCTTCTCKKFKTICHQITCPPATCASPSFVEGECCPSCLHSVDGEEGWSPWAEWTQCSVTCGSGTQQRGRSCDVTSNTCLGPSIQTRACSLSKCDTRIRQDGGWSHWSPWSSCSVTCGVGNITRIRLCNSPVPQMGGKNCKGSGRETKACQGAPCPIDGRWSPWSPWSACTVTCAGGIRERTRVCNSPEPQYGGKACVGDVQERQMCNKRSCPVDGCLSNPCFPGAQCSSFPDGSWSCGSCPVGFLGNGTHCEDLDECALVPDICFSTSKVPRCVNTQPGFHCLPCPPRYRGNQPVGVGLEAAKTEKQVCEPENPCKDKTHNCHKHAECIYLGHFSDPMYKCECQTGYAGDGLICGEDSDLDGWPNLNLVCATNATYHCIKDNCPHLPNSGQEDFDKDGIGDACDDDDDNDGVTDEKDNCQLLFNPRQADYDKDEVGDRCDNCPYVHNPAQIDTDNNGEGDACSVDIDGDDVFNERDNCPYVYNTDQRDTDGDGVGDHCDNCPLVHNPDQTDVDNDLVGDQCDNNEDIDDDGHQNNQDNCPYISNANQADHDRDGQGDACDPDDDNDGVPDDRDNCRLVFNPDQEDLDGDGRGDICKDDFDNDNIPDIDDVCPENNAISETDFRNFQMVPLDPKGTTQIDPNWVIRHQGKELVQTANSDPGIAVGFDEFGSVDFSGTFYVNTDRDDDYAGFVFGYQSSSRFYVVMWKQVTQTYWEDQPTRAYGYSGVSLKVVNSTTGTGEHLRNALWHTGNTPGQVRTLWHDPRNIGWKDYTAYRWHLTHRPKTGYIRVLVHEGKQVMADSGPIYDQTYAGGRLGLFVFSQEMVYFSDLKYECRDI

SEQ ID NO: 119 - DNA, 17 bp, Artificial Sequence
  THBS2_forward primer
cagcacgcaagctggtc

SEQ ID NO: 120 - DNA, 20 bp, Artificial Sequence
  THBS2_reverse primer
tgcggttgatgttgctgata

SEQ ID NO: 121 - DNA, 25 bp, Artificial Sequence
  THBS2 probe
accaggacaaagacacgaccttcga

SEQ ID NO: 122 - DNA, 4193 bp, Homo sapiens
cttcttctcgctgagtctcctcctcggctctgacggtacagtgatataatgatgatgggtgtcacaacccgcatttgaacttgcaggcgagctgccccgagcctttctggggaagaactccaggcgtgcggacgcaacagccgagaacattaggtgttgtggacaggagctgggaccaagatcttcggccagccccgcatcctcccgcatcttccagcaccgtcccgcaccctccgcatccttccccgggccaccacgcttcctatgtgacccgcctgggcaacgccgaacccagtcgcgcagcgctgcagtgaattttccccccaaactgcaataagccgccttccaaggccaagatgttcataaatataaagagcatcttatggatgtgttcaaccttaatagtaacccatgcgctacataaagtcaaagtgggaaaaagcccaccggtgaggggctccctctctggaaaagtcagcctaccttgtcatttttcaacgatgcctactttgccacccagttacaacaccagtgaatttctccgcatcaaatggtctaagattgaagtggacaaaaatggaaaagatttgaaagagactactgtccttgtggcccaaaatggaaatatcaagattggtcaggactacaaagggagagtgtctgtgcccacacatcccgaggctgtgggcgatgcctccctcactgtggtcaagctgctggcaagtgatgcgggtctttaccgctgtgacgtcatgtacgggattgaagacacacaagacacggtgtcactgactgtggatggggttgtgtttcactacagggcggcaaccagcaggtacacactgaattttgaggctgctcagaaggcttgtttggacgttggggcagtcatagcaactccagagcagctctttgctgcctatgaagatggatttgagcagtgtgacgcaggctggctggctgatcagactgtcagatatcccatccgggctcccagagtaggctgttatggagataagatgggaaaggcaggagtcaggacttatggattccgttctccccaggaaacttacgatgtgtattgttatgtggatcatctggatggtgatgtgttccacctcactgtccccagtaaattcaccttcgaggaggctgcaaaagagtgtgaaaaccaggatgccaggctggcaacagtgggggaactccaggcggcatggaggaacggctttgaccagtgcgattacgggtggctgtcggatgccagcgtgcgccaccctgtgactgtggccagggcccagtgtggaggtggtctacttggggtgagaaccctgtatcgttttgagaaccagacaggcttccctccccctgatagcagatttgatgcctactgctttaaacgacctgatcgctgcaaaatgaacccgtgccttaacggaggcacctgttatcctactgaaacttcctacgtatgcacctgtgtgccaggatacagcggagaccagtgtgaacttgattttgatgaatgtcactctaatccctgtcgtaatggagccacttgtgttgatggttttaacacattcaggtgcctctgccttccaagttatgttggtgcactttgtgagcaagataccgagacatgtgactatggctggcacaaattccaagggcagtgctacaaatactttgcccatcgacgcacatgggatgcagctgaacgggaatgccgtctgcagggtgcccatctcacaagcatcctgtctcacgaagaacaaatgtttgttaatcgtgtgggccatgattatcagtggataggcctcaatgacaagatgtttgagcatgacttccgttggactgatggcagcacactgcaatacgagaattggagacccaaccagccagacagcttcttttctgctggagaagactgtgttgtaatcatttggcatgagaatggccagtggaatgatgttccctgcaattaccatctcacctatacgtgcaagaaaggaacagtcgcttgcggccagccccctgttgtagaaaatgccaagacctttggaaagatgaaacctcgttatgaaatcaactccctgattagataccactgcaaagatggtttcattcaacgtcaccttccaactatccggtgcttaggaaatggaagatgggctatacctaaaattacctgcatgaacccatctgcataccaaaggacttattctatgaaatactttaaaaattcctcatcagcaaaggacaattcaataaatacatccaaacatgatcatcgttggagccggaggtggcaggagtcgaggcgctgatccctaaaatggcgaacatgtgttttcatcatttcagccaaagtcctaacttcctgtgcctttcctatcacctcgagaagtaattatcagttggtttggatttttggaccaccgttcagtcattttgggttgccgtgctcccaaaacattttaaatgaaagtattggcattcaaaaagacagcagacaaaatgaaagaaaatgagagcagaaagtaagcatttccagcctatctaatttctttagttttctatttgcctccagtgcagtccatttcctaatgtataccagcctactgtactatttaaaatgctcaatttcagcaccgatggccatgtaaataagatgatttaatgttgattttaatcctgtatataaaataaaaagtcacaatgagtttgggcatatttaatgatgattatggagccttagaggtctttaatcattggttcggctgcttttatgtagtttaggctggaaatggtttcacttgctctttgactgtcagcaagactgaagatggcttttcctggacagctagaaaacacaaaatcttgtaggtcattgcacctatctcagccataggtgcagtttgcttctacatgatgctaaaggctgcgaatgggatcctgatggaactaaggactccaatgtcgaactcttctttgctgcattcctttttcttcacttacaagaaaggcctgaatggaggacttttctgtaaccaggaacattttttaggggtcaaagtgctaataattaactcaaccaggtctactttttaatggctttcataacactaactcataaggttaccgatcaatgcatttcatacggatatagacctagggctctggagggtgggggattgttaaaacacatgcaaaaaaaaaaaaaaaaaaaaaaaaagaaattttgtatatataaccattttaatcttttataaagttttgaatgttcatgtatgaatgctgcagctgtgaagcatacataaataaatgaagtaagccatactgatttaatttattggatgttattttccctaagacctgaaaatgaacatagtatgctagttatttttcagtgttagccttttactttcctcacacaatttggaatcatataatataggtactttgtccctgattaaataatgtgacggatagaatgcatcaagtgtttattatgaaaagagtggaaaagtatatagcttttagcaaaaggtgtttgcccattctaagaaatgagcgaatatatagaaatagtgtgggcatttcttcctgttaggtggagtgtatgtgttgacatttctccccatctcttcccactctgttttctccccattatttgaataaagtgactgctgaagatgactttgaatccttatccacttaatttaatgtttaaagaaaaacctgtaatggaaagtaagactccttccctaatttcagtttagagcaacttgaagaagagtagacaaaaaataaaatgcacatagaaaaagagaaaaagggcacaaagggattggcccaatattgattctttttttataaaacctcctttggcttagaaggaatgactctagctacaataatacacagtatgtttaagcaggttcccttggttgttgcattaaatgtaatccacctttaggtattttagagcacagaacaacactgtgttgatctagtaggtttctatttttcctttctctttacaatgcacataatactttcctgtatttatatcataacgtgtatagtgtaaaatgtgaatgactttttttgtgaatgaaaatctaaaatctttgtaactttttatatctgcttttgtttcaccaaagaaacctaaaatccttcttttactacac

SEQ ID NO: 123 - DNA, 9455 bp, Homo sapiens
cttcttctcgctgagtctcctcctcggctctgacggtacagtgatataatgatgatgggtgtcacaacccgcatttgaacttgcaggcgagctgccccgagcctttctggggaagaactccaggcgtgcggacgcaacagccgagaacattaggtgttgtggacaggagctgggaccaagatcttcggccagccccgcatcctcccgcatcttccagcaccgtcccgcaccctccgcatccttccccgggccaccacgcttcctatgtgacccgcctgggcaacgccgaacccagtcgcgcagcgctgcagtgaattttccccccaaactgcaataagccgccttccaaggccaagatgttcataaatataaagagcatcttatggatgtgttcaaccttaatagtaacccatgcgctacataaagtcaaagtgggaaaaagcccaccggtgaggggctccctctctggaaaagtcagcctaccttgtcatttttcaacgatgcctactttgccacccagttacaacaccagtgaatttctccgcatcaaatggtctaagattgaagtggacaaaaatggaaaagatttgaaagagactactgtccttgtggcccaaaatggaaatatcaagattggtcaggactacaaagggagagtgtctgtgcccacacatcccgaggctgtgggcgatgcctccctcactgtggtcaagctgctggcaagtgatgcgggtctttaccgctgtgacgtcatgtacgggattgaagacacacaagacacggtgtcactgactgtggatggggttgtgtttcactacagggcggcaaccagcaggtacacactgaattttgaggctgctcagaaggcttgtttggacgttggggcagtcatagcaactccagagcagctctttgctgcctatgaagatggatttgagcagtgtgacgcaggctggctggctgatcagactgtcagatatcccatccgggctcccagagtaggctgttatggagataagatgggaaaggcaggagtcaggacttatggattccgttctccccaggaaacttacgatgtgtattgttatgtggatcatctggatggtgatgtgttccacctcactgtccccagtaaattcaccttcgaggaggctgcaaaagagtgtgaaaaccaggatgccaggctggcaacagtgggggaactccaggcggcatggaggaacggctttgaccagtgcgattacgggtggctgtcggatgccagcgtgcgccaccctgtgactgtggccagggcccagtgtggaggtggtctacttggggtgagaaccctgtatcgttttgagaaccagacaggcttccctccccctgatagcagatttgatgcctactgctttaaacgtcgaatgagtgatttgagtgtaattggtcatccaatagattcagaatctaaagaagatgaaccttgtagtgaagaaacagatccagtgcatgatctaatggctgaaattttacctgaattccctgacataattgaaatagacctataccacagtgaagaaaatgaagaagaagaagaagagtgtgcaaatgctactgatgtgacaaccaccccatctgtgcagtacataaatgggaagcatctcgttaccactgtgcccaaggacccagaagctgcagaagctaggcgtggccagtttgaaagtgttgcaccttctcagaatttctcggacagctctgaaagtgatactcatccatttgtaatagccaaaacggaattgtctactgctgtgcaacctaatgaatctacagaaacaactgagtctcttgaagttacatggaagcctgagacttaccctgaaacatcagaacatttttcaggtggtgagcctgatgttttccccacagtcccattccatgaggaatttgaaagtggaacagccaaaaaaggggcagaatcagtcacagagagagatactgaagttggtcatcaggcacatgaacatactgaacctgtatctctgtttcctgaagagtcttcaggagagattgccattgaccaagaatctcagaaaatagcctttgcaagggctacagaagtaacatttggtgaagaggtagaaaaaagtacttctgtcacatacactcccactatagttccaagttctgcatcagcatatgtttcagaggaagaagcagttaccctaataggaaatccttggccagatgacctgttgtctaccaaagaaagctgggtagaagcaactcctagacaagttgtagagctctcagggagttcttcgattccaattacagaaggctctggagaagcagaagaagatgaagatacaatgttcaccatggtaactgatttatcacagagaaatactactgatacactcattactttagacactagcaggataatcacagaaagcttttttgaggttcctgcaaccaccatttatccagtttctgaacaaccttctgcaaaagtggtgcctaccaagtttgtaagtgaaacagacacttctgagtggatttccagtaccactgttgaggaaaagaaaaggaaggaggaggagggaactacaggtacggcttctacatttgaggtatattcatctacacagagatcggatcaattaattttaccctttgaattagaaagtccaaatgtagctacatctagtgattcaggtaccaggaaaagttttatgtccttgacaacaccaacacagtctgaaagggaaatgacagattctactcctgtctttacagaaacaaatacattagaaaatttgggggcacagaccactgagcacagcagtatccatcaacctggggttcaggaagggctgaccactctcccacgtagtcctgcctctgtctttatggagcagggctctggagaagctgctgccgacccagaaaccaccactgtttcttcattttcattaaacgtagagtatgcaattcaagccgaaaaggaagtagctggcactttgtctccgcatgtggaaactacattctccactgagccaacaggactggttttgagtacagtaatggacagagtagttgctgaaaatataacccaaacatccagggaaatagtgatttcagagcgattaggagaaccaaattatggggcagaaataaggggcttttccacaggttttcctttggaggaagatttcagtggtgactttagagaatactcaacagtgtctcatcccatagcaaaagaagaaacggtaatgatggaaggctctggagatgcagcatttagggacacccagacttcaccatctacagtacctacttcagttcacatcagtcacatatctgactcagaaggacccagtagcaccatggtcagcacttcagccttcccctgggaagagtttacatcctcagctgagggctcaggtgagcaactggtcacagtcagcagctctgttgttccagtgcttcccagtgctgtgcaaaagttttctggtacagcttcctccattatcgacgaaggattgggagaagtgggtactgtcaatgaaattgatagaagatccaccattttaccaacagcagaagtggaaggtacgaaagctccagtagagaaggaggaagtaaaggtcagtggcacagtttcaacaaactttccccaaactatagagccagccaaattatggtctaggcaagaagtcaaccctgtaagacaagaaattgaaagtgaaacaacatcagaggaacaaattcaagaagaaaagtcatttgaatcccctcaaaactctcctgcaacagaacaaacaatctttgattcacagacatttactgaaactgaactcaaaaccacagattattctgtactaacaacaaagaaaacttacagtgatgataaagaaatgaaggaggaagacacttctttagttaacatgtctactccagatccagatgcaaatggcttggaatcttacacaactctccctgaagctactgaaaagtcacattttttcttagctactgcattagtaactgaatctataccagctgaacatgtagtcacagattcaccaatcaaaaaggaagaaagtacaaaacattttccgaaaggcatgagaccaacaattcaagagtcagatactgagctcttattctctggactgggatcaggagaagaagttttacctactctaccaacagagtcagtgaattttactgaagtggaacaaatcaataacacattatatccccacacttctcaagtggaaagtacctcaagtgacaaaattgaagactttaacagaatggaaaatgtggcaaaagaagttggaccactcgtatctcaaacagacatctttgaaggtagtgggtcagtaaccagcacaacattaatagaaattttaagtgacactggagcagaaggacccacggtggcacctctccctttctccacggacatcggacatcctcaaaatcagactgtcaggtgggcagaagaaatccagactagtagaccacaaaccataactgaacaagactctaacaagaattcttcaacagcagaaattaacgaaacaacaacctcatctactgattttctggctagagcttatggttttgaaatggccaaagaatttgttacatcagcaccaaaaccatctgacttgtattatgaaccttctggagaaggatctggagaagtggatattgttgattcatttcacacttctgcaactactcaggcaaccagacaagaaagcagcaccacatttgtttctgatgggtccctggaaaaacatcctgaggtgccaagcgctaaagctgttactgctgatggattcccaacagtttcagtgatgctgcctcttcattcagagcagaacaaaagctcccctgatccaactagcacactgtcaaatacagtgtcatatgagaggtccacagacggtagtttccaagaccgtttcagggaattcgaggattccaccttaaaacctaacagaaaaaaacccactgaaaatattatcatagacctggacaaagaggacaaggatttaatattgacaattacagagagtaccatccttgaaattctacctgagctgacatcggataaaaatactatcatagatattgatcatactaaacctgtgtatgaagacattcttggaatgcaaacagatatagatacagaggtaccatcagaaccacatgacagtaatgatgaaagtaatgatgacagcactcaagttcaagagatctatgaggcagctgtcaacctttctttaactgaggaaacatttgagggctctgctgatgttctggctagctacactcaggcaacacatgatgaatcaatgacttatgaagatagaagccaactagatcacatgggctttcacttcacaactgggatccctgctcctagcacagaaacagaattagacgttttacttcccacggcaacatccctgccaattcctcgtaagtctgccacagttattccagagattgaaggaataaaagctgaagcaaaagccctggatgacatgtttgaatcaagcactttgtctgatggtcaagctattgcagaccaaagtgaaataataccaacattgggccaatttgaaaggactcaggaggagtatgaagacaaaaaacatgctggtccttcttttcagccagaattctcttcaggagctgaggaggcattagtagaccatactccctatctaagtattgctactacccaccttatggatcagagtgtaacagaggtgcctgatgtgatggaaggatccaatcccccatattacactgatacaacattagcagtttcaacatttgcgaagttgtcttctcagacaccatcatctcccctcactatctactcaggcagtgaagcctctggacacacagagatcccccagcccagtgctctgccaggaatagacgtcggctcatctgtaatgtccccacaggattcttttaaggaaattcatgtaaatattgaagcgactttcaaaccatcaagtgaggaataccttcacataactgagcctccctctttatctcctgacacaaaattagaaccttcagaagatgatggtaaacctgagttattagaagaaatggaagcttctcccacagaacttattgctgtggaaggaactgagattctccaagatttccaaaacaaaaccgatggtcaagtttctggagaagcaatcaagatgtttcccaccattaaaacacctgaggctggaactgttattacaactgccgatgaaattgaattagaaggtgctacacagtggccacactctacttctgcttctgccacctatggggtcgaggcaggtgtggtgccttggctaagtccacagacttctgagaggcccacgctttcttcttctccagaaataaaccctgaaactcaagcagctttaatcagagggcaggattccacgatagcagcatcagaacagcaagtggcagcgagaattcttgattccaatgatcaggcaacagtaaaccctgtggaatttaatactgaggttgcaacaccaccattttcccttctggagacttctaatgaaacagatttcctgattggcattaatgaagagtcagtggaaggcacggcaatctatttaccaggacctgatcgctgcaaaatgaacccgtgccttaacggaggcacctgttatcctactgaaacttcctacgtatgcacctgtgtgccaggatacagcggagaccagtgtgaacttgattttgatgaatgtcactctaatccctgtcgtaatggagccacttgtgttgatggttttaacacattcaggtgcctctgccttccaagttatgttggtgcactttgtgagcaagataccgagacatgtgactatggctggcacaaattccaagggcagtgctacaaatactttgcccatcgacgcacatgggatgcagctgaacgggaatgccgtctgcagggtgcccatctcacaagcatcctgtctcacgaagaacaaatgtttgttaatcgtgtgggccatgattatcagtggataggcctcaatgacaagatgtttgagcatgacttccgttggactgatggcagcacactgcaatacgagaattggagacccaaccagccagacagcttcttttctgctggagaagactgtgttgtaatcatttggcatgagaatggccagtggaatgatgttccctgcaattaccatctcacctatacgtgcaagaaaggaacagtcgcttgcggccagccccctgttgtagaaaatgccaagacctttggaaagatgaaacctcgttatgaaatcaactccctgattagataccactgcaaagatggtttcattcaacgtcaccttccaactatccggtgcttaggaaatggaagatgggctatacctaaaattacctgcatgaacccatctgcataccaaaggacttattctatgaaatactttaaaaattcctcatcagcaaaggacaattcaataaatacatccaaacatgatcatcgttggagccggaggtggcaggagtcgaggcgctgatccctaaaatggcgaacatgtgttttcatcatttcagccaaagtcctaacttcctgtgcctttcctatcacctcgagaagtaattatcagttggtttggatttttggaccaccgttcagtcattttgggttgccgtgctcccaaaacattttaaatgaaagtattggcattcaaaaagacagcagacaaaatgaaagaaaatgagagcagaaagtaagcatttccagcctatctaatttctttagttttctatttgcctccagtgcagtccatttcctaatgtataccagcctactgtactatttaaaatgctcaatttcagcaccgatggccatgtaaataagatgatttaatgttgattttaatcctgtatataaaataaaaagtcacaatgagtttgggcatatttaatgatgattatggagccttagaggtctttaatcattggttcggctgcttttatgtagtttaggctggaaatggtttcacttgctctttgactgtcagcaagactgaagatggcttttcctggacagctagaaaacacaaaatcttgtaggtcattgcacctatctcagccataggtgcagtttgcttctacatgatgctaaaggctgcgaatgggatcctgatggaactaaggactccaatgtcgaactcttctttgctgcattcctttttcttcacttacaagaaaggcctgaatggaggacttttctgtaaccaggaacattttttaggggtcaaagtgctaataattaactcaaccaggtctactttttaatggctttcataacactaactcataaggttaccgatcaatgcatttcatacggatatagacctagggctctggagggtgggggattgttaaaacacatgcaaaaaaaaaaaaaaaaaaaaaaaaagaaattttgtatatataaccattttaatcttttataaagttttgaatgttcatgtatgaatgctgcagctgtgaagcatacataaataaatgaagtaagccatactgatttaatttattggatgttattttccctaagacctgaaaatgaacatagtatgctagttatttttcagtgttagccttttactttcctcacacaatttggaatcatataatataggtactttgtccctgattaaataatgtgacggatagaatgcatcaagtgtttattatgaaaagagtggaaaagtatatagcttttagcaaaaggtgtttgcccattctaagaaatgagcgaatatatagaaatagtgtgggcatttcttcctgttaggtggagtgtatgtgttgacatttctccccatctcttcccactctgttttctccccattatttgaataaagtgactgctgaagatgactttgaatccttatccacttaatttaatgtttaaagaaaaacctgtaatggaaagtaagactccttccctaatttcagtttagagcaacttgaagaagagtagacaaaaaataaaatgcacatagaaaaagagaaaaagggcacaaagggattggcccaatattgattctttttttataaaacctcctttggcttagaaggaatgactctagctacaataatacacagtatgtttaagcaggttcccttggttgttgcattaaatgtaatccacctttaggtattttagagcacagaacaacactgtgttgatctagtaggtttctatttttcctttctctttacaatgcacataatactttcctgtatttatatcataacgtgtatagtgtaaaatgtgaatgactttttttgtgaatgaaaatctaaaatctttgtaactttttatatctgcttttgtttcaccaaagaaacctaaaatccttcttttactacac

SEQ ID NO: 124 - DNA, 7154 bp, Homo sapiens
cttcttctcgctgagtctcctcctcggctctgacggtacagtgatataatgatgatgggtgtcacaacccgcatttgaacttgcaggcgagctgccccgagcctttctggggaagaactccaggcgtgcggacgcaacagccgagaacattaggtgttgtggacaggagctgggaccaagatcttcggccagccccgcatcctcccgcatcttccagcaccgtcccgcaccctccgcatccttccccgggccaccacgcttcctatgtgacccgcctgggcaacgccgaacccagtcgcgcagcgctgcagtgaattttccccccaaactgcaataagccgccttccaaggccaagatgttcataaatataaagagcatcttatggatgtgttcaaccttaatagtaacccatgcgctacataaagtcaaagtgggaaaaagcccaccggtgaggggctccctctctggaaaagtcagcctaccttgtcatttttcaacgatgcctactttgccacccagttacaacaccagtgaatttctccgcatcaaatggtctaagattgaagtggacaaaaatggaaaagatttgaaagagactactgtccttgtggcccaaaatggaaatatcaagattggtcaggactacaaagggagagtgtctgtgcccacacatcccgaggctgtgggcgatgcctccctcactgtggtcaagctgctggcaagtgatgcgggtctttaccgctgtgacgtcatgtacgggattgaagacacacaagacacggtgtcactgactgtggatggggttgtgtttcactacagggcggcaaccagcaggtacacactgaattttgaggctgctcagaaggcttgtttggacgttggggcagtcatagcaactccagagcagctctttgctgcctatgaagatggatttgagcagtgtgacgcaggctggctggctgatcagactgtcagatatcccatccgggctcccagagtaggctgttatggagataagatgggaaaggcaggagtcaggacttatggattccgttctccccaggaaacttacgatgtgtattgttatgtggatcatctggatggtgatgtgttccacctcactgtccccagtaaattcaccttcgaggaggctgcaaaagagtgtgaaaaccaggatgccaggctggcaacagtgggggaactccaggcggcatggaggaacggctttgaccagtgcgattacgggtggctgtcggatgccagcgtgcgccaccctgtgactgtggccagggcccagtgtggaggtggtctacttggggtgagaaccctgtatcgttttgagaaccagacaggcttccctccccctgatagcagatttgatgcctactgctttaaacctaaagaggctacaaccatcgatttgagtatcctcgcagaaactgcatcacccagtttatccaaagaaccacaaatggtttctgatagaactacaccaatcatccctttagttgatgaattacctgtcattccaacagagttccctcccgtgggaaatattgtcagttttgaacagaaagccacagtccaacctcaggctatcacagatagtttagccaccaaattacccacacctactggcagtaccaagaagccctgggatatggatgactactcaccttctgcttcaggacctcttggaaagctagacatatcagaaattaaggaagaagtgctccagagtacaactggcgtctctcattatgctacggattcatgggatggtgtcgtggaagataaacaaacacaagaatcggttacacagattgaacaaatagaagtgggtcctttggtaacatctatggaaatcttaaagcacattccttccaaggaattccctgtaactgaaacaccattggtaactgcaagaatgatcctggaatccaaaactgaaaagaaaatggtaagcactgtttctgaattggtaaccacaggtcactatggattcaccttgggagaagaggatgatgaagacagaacacttacagttggatctgatgagagcaccttgatctttgaccaaattcctgaagtcattacggtgtcaaagacttcagaagacaccatccacactcatttagaagacttggagtcagtctcagcatccacaactgtttcccctttaattatgcctgataataatggatcatccatggatgactgggaagagagacaaactagtggtaggataacggaagagtttcttggcaaatatctgtctactacaccttttccatcacagcatcgtacagaaatagaattgtttccttattctggtgataaaatattagtagagggaatttccacagttatttatccttctctacaaacagaaatgacacatagaagagaaagaacagaaacactaataccagagatgagaacagatacttatacagatgaaatacaagaagagatcactaaaagtccatttatgggaaaaacagaagaagaagtcttctctgggatgaaactctctacatctctctcagagccaattcatgttacagagtcttctgtggaaatgaccaagtcttttgatttcccaacattgataacaaagttaagtgcagagccaacagaagtaagagatatggaggaagactttacagcaactccaggtactacaaaatatgatgaaaatattacaacagtgcttttggcccatggtactttaagtgttgaagcagccactgtatcaaaatggtcatgggatgaagataatacaacatccaagcctttagagtctacagaaccttcagcctcttcaaaattgccccctgccttactcacaactgtggggatgaatggaaaggataaagacatcccaagtttcactgaagatggagcagatgaatttactcttattccagatagtactcaaaagcagttagaggaggttactgatgaagacatagcagcccatggaaaattcacaattagatttcagccaactacatcaactggtattgcagaaaagtcaactttgagagattctacaactgaagaaaaagttccacctatcacaagcactgaaggccaagtttatgcaaccatggaaggaagtgctttgggtgaagtagaagatgtggacctctctaagccagtatctactgttccccaatttgcacacacttcagaggtggaaggattagcatttgttagttatagtagcacccaagagcctactacttatgtagactcttcccataccattcctctttctgtaattcccaagacagactggggagtgttagtaccttctgttccatcagaagatgaagttctaggtgaaccctctcaagacatacttgtcattgatcagactcgccttgaagcgactatttctccagaaactatgagaacaacaaaaatcacagagggaacaactcaggaagaattcccttggaaagaacagactgcagagaaaccagttcctgctctcagttctacagcttggactcccaaggaggcagtaacaccactggatgaacaagagggcgatggatcagcatatacagtctctgaagatgaattgttgacaggttctgagagggtcccagttttagaaacaactccagttggaaaaattgatcacagtgtgtcttatccaccaggtgctgtaactgagcacaaagtgaaaacagatgaagtggtaacactaacaccacgcattgggccaaaagtatctttaagtccagggcctgaacaaaaatatgaaacagaaggtagtagtacaacaggatttacatcatctttgagtccttttagtacccacattacccagcttatggaagaaaccactactgagaaaacatccctagaggatattgatttaggctcaggattatttgaaaagcccaaagccacagaactcatagaattttcaacaatcaaagtcacagttccaagtgatattaccactgccttcagttcagtagacagacttcacacaacttcagcattcaagccatcttccgcgatcactaagaaaccacctctcatcgacagggaacctggtgaagaaacaaccagtgacatggtaatcattggagaatcaacatctcatgttcctcccactacccttgaagatattgtagccaaggaaacagaaaccgatattgatagagagtatttcacgacttcaagtcctcctgctacacagccaacaagaccacccactgtggaagacaaagaggcctttggacctcaggcgctttctacgccacagcccccagcaagcacaaaatttcaccctgacattaatgtttatattattgaggtcagagaaaataagacaggacctgatcgctgcaaaatgaacccgtgccttaacggaggcacctgttatcctactgaaacttcctacgtatgcacctgtgtgccaggatacagcggagaccagtgtgaacttgattttgatgaatgtcactctaatccctgtcgtaatggagccacttgtgttgatggttttaacacattcaggtgcctctgccttccaagttatgttggtgcactttgtgagcaagataccgagacatgtgactatggctggcacaaattccaagggcagtgctacaaatactttgcccatcgacgcacatgggatgcagctgaacgggaatgccgtctgcagggtgcccatctcacaagcatcctgtctcacgaagaacaaatgtttgttaatcgtgtgggccatgattatcagtggataggcctcaatgacaagatgtttgagcatgacttccgttggactgatggcagcacactgcaatacgagaattggagacccaaccagccagacagcttcttttctgctggagaagactgtgttgtaatcatttggcatgagaatggccagtggaatgatgttccctgcaattaccatctcacctatacgtgcaagaaaggaacagtcgcttgcggccagccccctgttgtagaaaatgccaagacctttggaaagatgaaacctcgttatgaaatcaactccctgattagataccactgcaaagatggtttcattcaacgtcaccttccaactatccggtgcttaggaaatggaagatgggctatacctaaaattacctgcatgaacccatctgcataccaaaggacttattctatgaaatactttaaaaattcctcatcagcaaaggacaattcaataaatacatccaaacatgatcatcgttggagccggaggtggcaggagtcgaggcgctgatccctaaaatggcgaacatgtgttttcatcatttcagccaaagtcctaacttcctgtgcctttcctatcacctcgagaagtaattatcagttggtttggatttttggaccaccgttcagtcattttgggttgccgtgctcccaaaacattttaaatgaaagtattggcattcaaaaagacagcagacaaaatgaaagaaaatgagagcagaaagtaagcatttccagcctatctaatttctttagttttctatttgcctccagtgcagtccatttcctaatgtataccagcctactgtactatttaaaatgctcaatttcagcaccgatggccatgtaaataagatgatttaatgttgattttaatcctgtatataaaataaaaagtcacaatgagtttgggcatatttaatgatgattatggagccttagaggtctttaatcattggttcggctgcttttatgtagtttaggctggaaatggtttcacttgctctttgactgtcagcaagactgaagatggcttttcctggacagctagaaaacacaaaatcttgtaggtcattgcacctatctcagccataggtgcagtttgcttctacatgatgctaaaggctgcgaatgggatcctgatggaactaaggactccaatgtcgaactcttctttgctgcattcctttttcttcacttacaagaaaggcctgaatggaggacttttctgtaaccaggaacattttttaggggtcaaagtgctaataattaactcaaccaggtctactttttaatggctttcataacactaactcataaggttaccgatcaatgcatttcatacggatatagacctagggctctggagggtgggggattgttaaaacacatgcaaaaaaaaaaaaaaaaaaaaaaaaagaaattttgtatatataaccattttaatcttttataaagttttgaatgttcatgtatgaatgctgcagctgtgaagcatacataaataaatgaagtaagccatactgatttaatttattggatgttattttccctaagacctgaaaatgaacatagtatgctagttatttttcagtgttagccttttactttcctcacacaatttggaatcatataatataggtactttgtccctgattaaataatgtgacggatagaatgcatcaagtgtttattatgaaaagagtggaaaagtatatagcttttagcaaaaggtgtttgcccattctaagaaatgagcgaatatatagaaatagtgtgggcatttcttcctgttaggtggagtgtatgtgttgacatttctccccatctcttcccactctgttttctccccattatttgaataaagtgactgctgaagatgactttgaatccttatccacttaatttaatgtttaaagaaaaacctgtaatggaaagtaagactccttccctaatttcagtttagagcaacttgaagaagagtagacaaaaaataaaatgcacatagaaaaagagaaaaagggcacaaagggattggcccaatattgattctttttttataaaacctcctttggcttagaaggaatgactctagctacaataatacacagtatgtttaagcaggttcccttggttgttgcattaaatgtaatccacctttaggtattttagagcacagaacaacactgtgttgatctagtaggtttctatttttcctttctctttacaatgcacataatactttcctgtatttatatcataacgtgtatagtgtaaaatgtgaatgactttttttgtgaatgaaaatctaaaatctttgtaactttttatatctgcttttgtttcaccaaagaaacctaaaatccttcttttactacac

SEQ ID NO: 125 - DNA, 12416 bp, Homo sapiens
cttcttctcgctgagtctcctcctcggctctgacggtacagtgatataatgatgatgggtgtcacaacccgcatttgaacttgcaggcgagctgccccgagcctttctggggaagaactccaggcgtgcggacgcaacagccgagaacattaggtgttgtggacaggagctgggaccaagatcttcggccagccccgcatcctcccgcatcttccagcaccgtcccgcaccctccgcatccttccccgggccaccacgcttcctatgtgacccgcctgggcaacgccgaacccagtcgcgcagcgctgcagtgaattttccccccaaactgcaataagccgccttccaaggccaagatgttcataaatataaagagcatcttatggatgtgttcaaccttaatagtaacccatgcgctacataaagtcaaagtgggaaaaagcccaccggtgaggggctccctctctggaaaagtcagcctaccttgtcatttttcaacgatgcctactttgccacccagttacaacaccagtgaatttctccgcatcaaatggtctaagattgaagtggacaaaaatggaaaagatttgaaagagactactgtccttgtggcccaaaatggaaatatcaagattggtcaggactacaaagggagagtgtctgtgcccacacatcccgaggctgtgggcgatgcctccctcactgtggtcaagctgctggcaagtgatgcgggtctttaccgctgtgacgtcatgtacgggattgaagacacacaagacacggtgtcactgactgtggatggggttgtgtttcactacagggcggcaaccagcaggtacacactgaattttgaggctgctcagaaggcttgtttggacgttggggcagtcatagcaactccagagcagctctttgctgcctatgaagatggatttgagcagtgtgacgcaggctggctggctgatcagactgtcagatatcccatccgggctcccagagtaggctgttatggagataagatgggaaaggcaggagtcaggacttatggattccgttctccccaggaaacttacgatgtgtattgttatgtggatcatctggatggtgatgtgttccacctcactgtccccagtaaattcaccttcgaggaggctgcaaaagagtgtgaaaaccaggatgccaggctggcaacagtgggggaactccaggcggcatggaggaacggctttgaccagtgcgattacgggtggctgtcggatgccagcgtgcgccaccctgtgactgtggccagggcccagtgtggaggtggtctacttggggtgagaaccctgtatcgttttgagaaccagacaggcttccctccccctgatagcagatttgatgcctactgctttaaacctaaagaggctacaaccatcgatttgagtatcctcgcagaaactgcatcacccagtttatccaaagaaccacaaatggtttctgatagaactacaccaatcatccctttagttgatgaattacctgtcattccaacagagttccctcccgtgggaaatattgtcagttttgaacagaaagccacagtccaacctcaggctatcacagatagtttagccaccaaattacccacacctactggcagtaccaagaagccctgggatatggatgactactcaccttctgcttcaggacctcttggaaagctagacatatcagaaattaaggaagaagtgctccagagtacaactggcgtctctcattatgctacggattcatgggatggtgtcgtggaagataaacaaacacaagaatcggttacacagattgaacaaatagaagtgggtcctttggtaacatctatggaaatcttaaagcacattccttccaaggaattccctgtaactgaaacaccattggtaactgcaagaatgatcctggaatccaaaactgaaaagaaaatggtaagcactgtttctgaattggtaaccacaggtcactatggattcaccttgggagaagaggatgatgaagacagaacacttacagttggatctgatgagagcaccttgatctttgaccaaattcctgaagtcattacggtgtcaaagacttcagaagacaccatccacactcatttagaagacttggagtcagtctcagcatccacaactgtttcccctttaattatgcctgataataatggatcatccatggatgactgggaagagagacaaactagtggtaggataacggaagagtttcttggcaaatatctgtctactacaccttttccatcacagcatcgtacagaaatagaattgtttccttattctggtgataaaatattagtagagggaatttccacagttatttatccttctctacaaacagaaatgacacatagaagagaaagaacagaaacactaataccagagatgagaacagatacttatacagatgaaatacaagaagagatcactaaaagtccatttatgggaaaaacagaagaagaagtcttctctgggatgaaactctctacatctctctcagagccaattcatgttacagagtcttctgtggaaatgaccaagtcttttgatttcccaacattgataacaaagttaagtgcagagccaacagaagtaagagatatggaggaagactttacagcaactccaggtactacaaaatatgatgaaaatattacaacagtgcttttggcccatggtactttaagtgttgaagcagccactgtatcaaaatggtcatgggatgaagataatacaacatccaagcctttagagtctacagaaccttcagcctcttcaaaattgccccctgccttactcacaactgtggggatgaatggaaaggataaagacatcccaagtttcactgaagatggagcagatgaatttactcttattccagatagtactcaaaagcagttagaggaggttactgatgaagacatagcagcccatggaaaattcacaattagatttcagccaactacatcaactggtattgcagaaaagtcaactttgagagattctacaactgaagaaaaagttccacctatcacaagcactgaaggccaagtttatgcaaccatggaaggaagtgctttgggtgaagtagaagatgtggacctctctaagccagtatctactgttccccaatttgcacacacttcagaggtggaaggattagcatttgttagttatagtagcacccaagagcctactacttatgtagactcttcccataccattcctctttctgtaattcccaagacagactggggagtgttagtaccttctgttccatcagaagatgaagttctaggtgaaccctctcaagacatacttgtcattgatcagactcgccttgaagcgactatttctccagaaactatgagaacaacaaaaatcacagagggaacaactcaggaagaattcccttggaaagaacagactgcagagaaaccagttcctgctctcagttctacagcttggactcccaaggaggcagtaacaccactggatgaacaagagggcgatggatcagcatatacagtctctgaagatgaattgttgacaggttctgagagggtcccagttttagaaacaactccagttggaaaaattgatcacagtgtgtcttatccaccaggtgctgtaactgagcacaaagtgaaaacagatgaagtggtaacactaacaccacgcattgggccaaaagtatctttaagtccagggcctgaacaaaaatatgaaacagaaggtagtagtacaacaggatttacatcatctttgagtccttttagtacccacattacccagcttatggaagaaaccactactgagaaaacatccctagaggatattgatttaggctcaggattatttgaaaagcccaaagccacagaactcatagaattttcaacaatcaaagtcacagttccaagtgatattaccactgccttcagttcagtagacagacttcacacaacttcagcattcaagccatcttccgcgatcactaagaaaccacctctcatcgacagggaacctggtgaagaaacaaccagtgacatggtaatcattggagaatcaacatctcatgttcctcccactacccttgaagatattgtagccaaggaaacagaaaccgatattgatagagagtatttcacgacttcaagtcctcctgctacacagccaacaagaccacccactgtggaagacaaagaggcctttggacctcaggcgctttctacgccacagcccccagcaagcacaaaatttcaccctgacattaatgtttatattattgaggtcagagaaaataagacaggtcgaatgagtgatttgagtgtaattggtcatccaatagattcagaatctaaagaagatgaaccttgtagtgaagaaacagatccagtgcatgatctaatggctgaaattttacctgaattccctgacataattgaaatagacctataccacagtgaagaaaatgaagaagaagaagaagagtgtgcaaatgctactgatgtgacaaccaccccatctgtgcagtacataaatgggaagcatctcgttaccactgtgcccaaggacccagaagctgcagaagctaggcgtggccagtttgaaagtgttgcaccttctcagaatttctcggacagctctgaaagtgatactcatccatttgtaatagccaaaacggaattgtctactgctgtgcaacctaatgaatctacagaaacaactgagtctcttgaagttacatggaagcctgagacttaccctgaaacatcagaacatttttcaggtggtgagcctgatgttttccccacagtcccattccatgaggaatttgaaagtggaacagccaaaaaaggggcagaatcagtcacagagagagatactgaagttggtcatcaggcacatgaacatactgaacctgtatctctgtttcctgaagagtcttcaggagagattgccattgaccaagaatctcagaaaatagcctttgcaagggctacagaagtaacatttggtgaagaggtagaaaaaagtacttctgtcacatacactcccactatagttccaagttctgcatcagcatatgtttcagaggaagaagcagttaccctaataggaaatccttggccagatgacctgttgtctaccaaagaaagctgggtagaagcaactcctagacaagttgtagagctctcagggagttcttcgattccaattacagaaggctctggagaagcagaagaagatgaagatacaatgttcaccatggtaactgatttatcacagagaaatactactgatacactcattactttagacactagcaggataatcacagaaagcttttttgaggttcctgcaaccaccatttatccagtttctgaacaaccttctgcaaaagtggtgcctaccaagtttgtaagtgaaacagacacttctgagtggatttccagtaccactgttgaggaaaagaaaaggaaggaggaggagggaactacaggtacggcttctacatttgaggtatattcatctacacagagatcggatcaattaattttaccctttgaattagaaagtccaaatgtagctacatctagtgattcaggtaccaggaaaagttttatgtccttgacaacaccaacacagtctgaaagggaaatgacagattctactcctgtctttacagaaacaaatacattagaaaatttgggggcacagaccactgagcacagcagtatccatcaacctggggttcaggaagggctgaccactctcccacgtagtcctgcctctgtctttatggagcagggctctggagaagctgctgccgacccagaaaccaccactgtttcttcattttcattaaacgtagagtatgcaattcaagccgaaaaggaagtagctggcactttgtctccgcatgtggaaactacattctccactgagccaacaggactggttttgagtacagtaatggacagagtagttgctgaaaatataacccaaacatccagggaaatagtgatttcagagcgattaggagaaccaaattatggggcagaaataaggggcttttccacaggttttcctttggaggaagatttcagtggtgactttagagaatactcaacagtgtctcatcccatagcaaaagaagaaacggtaatgatggaaggctctggagatgcagcatttagggacacccagacttcaccatctacagtacctacttcagttcacatcagtcacatatctgactcagaaggacccagtagcaccatggtcagcacttcagccttcccctgggaagagtttacatcctcagctgagggctcaggtgagcaactggtcacagtcagcagctctgttgttccagtgcttcccagtgctgtgcaaaagttttctggtacagcttcctccattatcgacgaaggattgggagaagtgggtactgtcaatgaaattgatagaagatccaccattttaccaacagcagaagtggaaggtacgaaagctccagtagagaaggaggaagtaaaggtcagtggcacagtttcaacaaactttccccaaactatagagccagccaaattatggtctaggcaagaagtcaaccctgtaagacaagaaattgaaagtgaaacaacatcagaggaacaaattcaagaagaaaagtcatttgaatcccctcaaaactctcctgcaacagaacaaacaatctttgattcacagacatttactgaaactgaactcaaaaccacagattattctgtactaacaacaaagaaaacttacagtgatgataaagaaatgaaggaggaagacacttctttagttaacatgtctactccagatccagatgcaaatggcttggaatcttacacaactctccctgaagctactgaaaagtcacattttttcttagctactgcattagtaactgaatctataccagctgaacatgtagtcacagattcaccaatcaaaaaggaagaaagtacaaaacattttccgaaaggcatgagaccaacaattcaagagtcagatactgagctcttattctctggactgggatcaggagaagaagttttacctactctaccaacagagtcagtgaattttactgaagtggaacaaatcaataacacattatatccccacacttctcaagtggaaagtacctcaagtgacaaaattgaagactttaacagaatggaaaatgtggcaaaagaagttggaccactcgtatctcaaacagacatctttgaaggtagtgggtcagtaaccagcacaacattaatagaaattttaagtgacactggagcagaaggacccacggtggcacctctccctttctccacggacatcggacatcctcaaaatcagactgtcaggtgggcagaagaaatccagactagtagaccacaaaccataactgaacaagactctaacaagaattcttcaacagcagaaattaacgaaacaacaacctcatctactgattttctggctagagcttatggttttgaaatggccaaagaatttgttacatcagcaccaaaaccatctgacttgtattatgaaccttctggagaaggatctggagaagtggatattgttgattcatttcacacttctgcaactactcaggcaaccagacaagaaagcagcaccacatttgtttctgatgggtccctggaaaaacatcctgaggtgccaagcgctaaagctgttactgctgatggattcccaacagtttcagtgatgctgcctcttcattcagagcagaacaaaagctcccctgatccaactagcacactgtcaaatacagtgtcatatgagaggtccacagacggtagtttccaagaccgtttcagggaattcgaggattccaccttaaaacctaacagaaaaaaacccactgaaaatattatcatagacctggacaaagaggacaaggatttaatattgacaattacagagagtaccatccttgaaattctacctgagctgacatcggataaaaatactatcatagatattgatcatactaaacctgtgtatgaagacattcttggaatgcaaacagatatagatacagaggtaccatcagaaccacatgacagtaatgatgaaagtaatgatgacagcactcaagttcaagagatctatgaggcagctgtcaacctttctttaactgaggaaacatttgagggctctgctgatgttctggctagctacactcaggcaacacatgatgaatcaatgacttatgaagatagaagccaactagatcacatgggctttcacttcacaactgggatccctgctcctagcacagaaacagaattagacgttttacttcccacggcaacatccctgccaattcctcgtaagtctgccacagttattccagagattgaaggaataaaagctgaagcaaaagccctggatgacatgtttgaatcaagcactttgtctgatggtcaagctattgcagaccaaagtgaaataataccaacattgggccaatttgaaaggactcaggaggagtatgaagacaaaaaacatgctggtccttcttttcagccagaattctcttcaggagctgaggaggcattagtagaccatactccctatctaagtattgctactacccaccttatggatcagagtgtaacagaggtgcctgatgtgatggaaggatccaatcccccatattacactgatacaacattagcagtttcaacatttgcgaagttgtcttctcagacaccatcatctcccctcactatctactcaggcagtgaagcctctggacacacagagatcccccagcccagtgctctgccaggaatagacgtcggctcatctgtaatgtccccacaggattcttttaaggaaattcatgtaaatattgaagcgactttcaaaccatcaagtgaggaataccttcacataactgagcctccctctttatctcctgacacaaaattagaaccttcagaagatgatggtaaacctgagttattagaagaaatggaagcttctcccacagaacttattgctgtggaaggaactgagattctccaagatttccaaaacaaaaccgatggtcaagtttctggagaagcaatcaagatgtttcccaccattaaaacacctgaggctggaactgttattacaactgccgatgaaattgaattagaaggtgctacacagtggccacactctacttctgcttctgccacctatggggtcgaggcaggtgtggtgccttggctaagtccacagacttctgagaggcccacgctttcttcttctccagaaataaaccctgaaactcaagcagctttaatcagagggcaggattccacgatagcagcatcagaacagcaagtggcagcgagaattcttgattccaatgatcaggcaacagtaaaccctgtggaatttaatactgaggttgcaacaccaccattttcccttctggagacttctaatgaaacagatttcctgattggcattaatgaagagtcagtggaaggcacggcaatctatttaccaggacctgatcgctgcaaaatgaacccgtgccttaacggaggcacctgttatcctactgaaacttcctacgtatgcacctgtgtgccaggatacagcggagaccagtgtgaacttgattttgatgaatgtcactctaatccctgtcgtaatggagccacttgtgttgatggttttaacacattcaggtgcctctgccttccaagttatgttggtgcactttgtgagcaagataccgagacatgtgactatggctggcacaaattccaagggcagtgctacaaatactttgcccatcgacgcacatgggatgcagctgaacgggaatgccgtctgcagggtgcccatctcacaagcatcctgtctcacgaagaacaaatgtttgttaatcgtgtgggccatgattatcagtggataggcctcaatgacaagatgtttgagcatgacttccgttggactgatggcagcacactgcaatacgagaattggagacccaaccagccagacagcttcttttctgctggagaagactgtgttgtaatcatttggcatgagaatggccagtggaatgatgttccctgcaattaccatctcacctatacgtgcaagaaaggaacagtcgcttgcggccagccccctgttgtagaaaatgccaagacctttggaaagatgaaacctcgttatgaaatcaactccctgattagataccactgcaaagatggtttcattcaacgtcaccttccaactatccggtgcttaggaaatggaagatgggctatacctaaaattacctgcatgaacccatctgcataccaaaggacttattctatgaaatactttaaaaattcctcatcagcaaaggacaattcaataaatacatccaaacatgatcatcgttggagccggaggtggcaggagtcgaggcgctgatccctaaaatggcgaacatgtgttttcatcatttcagccaaagtcctaacttcctgtgcctttcctatcacctcgagaagtaattatcagttggtttggatttttggaccaccgttcagtcattttgggttgccgtgctcccaaaacattttaaatgaaagtattggcattcaaaaagacagcagacaaaatgaaagaaaatgagagcagaaagtaagcatttccagcctatctaatttctttagttttctatttgcctccagtgcagtccatttcctaatgtataccagcctactgtactatttaaaatgctcaatttcagcaccgatggccatgtaaataagatgatttaatgttgattttaatcctgtatataaaataaaaagtcacaatgagtttgggcatatttaatgatgattatggagccttagaggtctttaatcattggttcggctgcttttatgtagtttaggctggaaatggtttcacttgctctttgactgtcagcaagactgaagatggcttttcctggacagctagaaaacacaaaatcttgtaggtcattgcacctatctcagccataggtgcagtttgcttctacatgatgctaaaggctgcgaatgggatcctgatggaactaaggactccaatgtcgaactcttctttgctgcattcctttttcttcacttacaagaaaggcctgaatggaggacttttctgtaaccaggaacattttttaggggtcaaagtgctaataattaactcaaccaggtctactttttaatggctttcataacactaactcataaggttaccgatcaatgcatttcatacggatatagacctagggctctggagggtgggggattgttaaaacacatgcaaaaaaaaaaaaaaaaaaaaaaaaagaaattttgtatatataaccattttaatcttttataaagttttgaatgttcatgtatgaatgctgcagctgtgaagcatacataaataaatgaagtaagccatactgatttaatttattggatgttattttccctaagacctgaaaatgaacatagtatgctagttatttttcagtgttagccttttactttcctcacacaatttggaatcatataatataggtactttgtccctgattaaataatgtgacggatagaatgcatcaagtgtttattatgaaaagagtggaaaagtatatagcttttagcaaaaggtgtttgcccattctaagaaatgagcgaatatatagaaatagtgtgggcatttcttcctgttaggtggagtgtatgtgttgacatttctccccatctcttcccactctgttttctccccattatttgaataaagtgactgctgaagatgactttgaatccttatccacttaatttaatgtttaaagaaaaacctgtaatggaaagtaagactccttccctaatttcagtttagagcaacttgaagaagagtagacaaaaaataaaatgcacatagaaaaagagaaaaagggcacaaagggattggcccaatattgattctttttttataaaacctcctttggcttagaaggaatgactctagctacaataatacacagtatgtttaagcaggttcccttggttgttgcattaaatgtaatccacctttaggtattttagagcacagaacaacactgtgttgatctagtaggtttctatttttcctttctctttacaatgcacataatactttcctgtatttatatcataacgtgtatagtgtaaaatgtgaatgactttttttgtgaatgaaaatctaaaatctttgtaactttttatatctgcttttgtttcaccaaagaaacctaaaatccttcttttactacac

SEQ ID NO: 126 - protein, 655 aa, Homo sapiens
MFINIKSILWMCSTLIVTHALHKVKVGKSPPVRGSLSGKVSLPCHFSTMPTLPPSYNTSEFLRIKWSKIEVDKNGKDLKETTVLVAQNGNIKIGQDYKGRVSVPTHPEAVGDASLTVVKLLASDAGLYRCDVMYGIEDTQDTVSLTVDGVVFHYRAATSRYTLNFEAAQKACLDVGAVIATPEQLFAAYEDGFEQCDAGWLADQTVRYPIRAPRVGCYGDKMGKAGVRTYGFRSPQETYDVYCYVDHLDGDVFHLTVPSKFTFEEAAKECENQDARLATVGELQAAWRNGFDQCDYGWLSDASVRHPVTVARAQCGGGLLGVRTLYRFENQTGFPPPDSRFDAYCFKRPDRCKMNPCLNGGTCYPTETSYVCTCVPGYSGDQCELDFDECHSNPCRNGATCVDGFNTFRCLCLPSYVGALCEQDTETCDYGWHKFQGQCYKYFAHRRTWDAAERECRLQGAHLTSILSHEEQMFVNRVGHDYQWIGLNDKMFEHDFRWTDGSTLQYENWRPNQPDSFFSAGEDCVVIIWHENGQWNDVPCNYHLTYTCKKGTVACGQPPVVENAKTFGKMKPRYEINSLIRYHCKDGFIQRHLPTIRCLGNGRWAIPKITCMNPSAYQRTYSMKYFKNSSSAKDNSINTSKHDHRWSRRWQESRR

SEQ ID NO: 127 - protein, 2409 aa, Homo sapiens
MFINIKSILWMCSTLIVTHALHKVKVGKSPPVRGSLSGKVSLPCHFSTMPTLPPSYNTSEFLRIKWSKIEVDKNGKDLKETTVLVAQNGNIKIGQDYKGRVSVPTHPEAVGDASLTVVKLLASDAGLYRCDVMYGIEDTQDTVSLTVDGVVFHYRAATSRYTLNFEAAQKACLDVGAVIATPEQLFAAYEDGFEQCDAGWLADQTVRYPIRAPRVGCYGDKMGKAGVRTYGFRSPQETYDVYCYVDHLDGDVFHLTVPSKFTFEEAAKECENQDARLATVGELQAAWRNGFDQCDYGWLSDASVRHPVTVARAQCGGGLLGVRTLYRFENQTGFPPPDSRFDAYCFKRRMSDLSVIGHPIDSESKEDEPCSEETDPVHDLMAEILPEFPDIIEIDLYHSEENEEEEEECANATDVTTTPSVQYINGKHLVTTVPKDPEAAEARRGQFESVAPSQNFSDSSESDTHPFVIAKTELSTAVQPNESTETTESLEVTWKPETYPETSEHFSGGEPDVFPTVPFHEEFESGTAKKGAESVTERDTEVGHQAHEHTEPVSLFPEESSGEIAIDQESQKIAFARATEVTFGEEVEKSTSVTYTPTIVPSSASAYVSEEEAVTLIGNPWPDDLLSTKESWVEATPRQVVELSGSSSIPITEGSGEAEEDEDTMFTMVTDLSQRNTTDTLITLDTSRIITESFFEVPATTIYPVSEQPSAKVVPTKFVSETDTSEWISSTTVEEKKRKEEEGTTGTASTFEVYSSTQRSDQLILPFELESPNVATSSDSGTRKSFMSLTTPTQSEREMTDSTPVFTETNTLENLGAQTTEHSSIHQPGVQEGLTTLPRSPASVFMEQGSGEAAADPETTTVSSFSLNVEYAIQAEKEVAGTLSPHVETTFSTEPTGLVLSTVMDRVVAENITQTSREIVISERLGEPNYGAEIRGFSTGFPLEEDFSGDFREYSTVSHPIAKEETVMMEGSGDAAFRDTQTSPSTVPTSVHISHISDSEGPSSTMVSTSAFPWEEFTSSAEGSGEQLVTVSSSVVPVLPSAVQKFSGTASSIIDEGLGEVGTVNEIDRRSTILPTAEVEGTKAPVEKEEVKVSGTVSTNFPQTIEPAKLWSRQEVNPVRQEIESETTSEEQIQEEKSFESPQNSPATEQTIFDSQTFTETELKTTDYSVLTTKKTYSDDKEMKEEDTSLVNMSTPDPDANGLESYTTLPEATEKSHFFLATALVTESIPAEHVVTDSPIKKEESTKHFPKGMRPTIQESDTELLFSGLGSGEEVLPTLPTESVNFTEVEQINNTLYPHTSQVESTSSDKIEDFNRMENVAKEVGPLVSQTDIFEGSGSVTSTTLIEILSDTGAEGPTVAPLPFSTDIGHPQNQTVRWAEEIQTSRPQTITEQDSNKNSSTAEINETTTSSTDFLARAYGFEMAKEFVTSAPKPSDLYYEPSGEGSGEVDIVDSFHTSATTQATRQESSTTFVSDGSLEKHPEVPSAKAVTADGFPTVSVMLPLHSEQNKSSPDPTSTLSNTVSYERSTDGSFQDRFREFEDSTLKPNRKKPTENIIIDLDKEDKDLILTITESTILEILPELTSDKNTIIDIDHTKPVYEDILGMQTDIDTEVPSEPHDSNDESNDDSTQVQEIYEAAVNLSLTEETFEGSADVLASYTQATHDESMTYEDRSQLDHMGFHFTTGIPAPSTETELDVLLPTATSLPIPRKSATVIPEIEGIKAEAKALDDMFESSTLSDGQAIADQSEIIPTLGQFERTQEEYEDKKHAGPSFQPEFSSGAEEALVDHTPYLSIATTHLMDQSVTEVPDVMEGSNPPYYTDTTLAVSTFAKLSSQTPSSPLTIYSGSEASGHTEIPQPSALPGIDVGSSVMSPQDSFKEIHVNIEATFKPSSEEYLHITEPPSLSPDTKLEPSEDDGKPELLEEMEASPTELIAVEGTEILQDFQNKTDGQVSGEAIKMFPTIKTPEAGTVITTADEIELEGATQWPHSTSASATYGVEAGVVPWLSPQTSERPTLSSSPEINPETQAALIRGQDSTIAASEQQVAARILDSNDQATVNPVEFNTEVATPPFSLLETSNETDFLIGINEESVEGTAIYLPGPDRCKMNPCLNGGTCYPTETSYVCTCVPGYSGDQCELDFDECHSNPCRNGATCVDGFNTFRCLCLPSYVGALCEQDTETCDYGWHKFQGQCYKYFAHRRTWDAAERECRLQGAHLTSILSHEEQMFVNRVGHDYQWIGLNDKMFEHDFRWTDGSTLQYENWRPNQPDSFFSAGEDCVVIIWHENGQWNDVPCNYHLTYTCKKGTVACGQPPVVENAKTFGKMKPRYEINSLIRYHCKDGFIQRHLPTIRCLGNGRWAIPKITCMNPSAYQRTYSMKYFKNSSSAKDNSINTSKHDHRWSRRWQESRR

SEQ ID NO: 128 - protein, 1642 aa, Homo sapiens
MFINIKSILWMCSTLIVTHALHKVKVGKSPPVRGSLSGKVSLPCHFSTMPTLPPSYNTSEFLRIKWSKIEVDKNGKDLKETTVLVAQNGNIKIGQDYKGRVSVPTHPEAVGDASLTVVKLLASDAGLYRCDVMYGIEDTQDTVSLTVDGVVFHYRAATSRYTLNFEAAQKACLDVGAVIATPEQLFAAYEDGFEQCDAGWLADQTVRYPIRAPRVGCYGDKMGKAGVRTYGFRSPQETYDVYCYVDHLDGDVFHLTVPSKFTFEEAAKECENQDARLATVGELQAAWRNGFDQCDYGWLSDASVRHPVTVARAQCGGGLLGVRTLYRFENQTGFPPPDSRFDAYCFKPKEATTIDLSILAETASPSLSKEPQMVSDRTTPIIPLVDELPVIPTEFPPVGNIVSFEQKATVQPQAITDSLATKLPTPTGSTKKPWDMDDYSPSASGPLGKLDISEIKEEVLQSTTGVSHYATDSWDGVVEDKQTQESVTQIEQIEVGPLVTSMEILKHIPSKEFPVTETPLVTARMILESKTEKKMVSTVSELVTTGHYGFTLGEEDDEDRTLTVGSDESTLIFDQIPEVITVSKTSEDTIHTHLEDLESVSASTTVSPLIMPDNNGSSMDDWEERQTSGRITEEFLGKYLSTTPFPSQHRTEIELFPYSGDKILVEGISTVIYPSLQTEMTHRRERTETLIPEMRTDTYTDEIQEEITKSPFMGKTEEEVFSGMKLSTSLSEPIHVTESSVEMTKSFDFPTLITKLSAEPTEVRDMEEDFTATPGTTKYDENITTVLLAHGTLSVEAATVSKWSWDEDNTTSKPLESTEPSASSKLPPALLTTVGMNGKDKDIPSFTEDGADEFTLIPDSTQKQLEEVTDEDIAAHGKFTIRFQPTTSTGIAEKSTLRDSTTEEKVPPITSTEGQVYATMEGSALGEVEDVDLSKPVSTVPQFAHTSEVEGLAFVSYSSTQEPTTYVDSSHTIPLSVIPKTDWGVLVPSVPSEDEVLGEPSQDILVIDQTRLEATISPETMRTTKITEGTTQEEFPWKEQTAEKPVPALSSTAWTPKEAVTPLDEQEGDGSAYTVSEDELLTGSERVPVLETTPVGKIDHSVSYPPGAVTEHKVKTDEVVTLTPRIGPKVSLSPGPEQKYETEGSSTTGFTSSLSPFSTHITQLMEETTTEKTSLEDIDLGSGLFEKPKATELIEFSTIKVTVPSDITTAFSSVDRLHTTSAFKPSSAITKKPPLIDREPGEETTSDMVIIGESTSHVPPTTLEDIVAKETETDIDREYFTTSSPPATQPTRPPTVEDKEAFGPQALSTPQPPASTKFHPDINVYIIEVRENKTGPDRCKMNPCLNGGTCYPTETSYVCTCVPGYSGDQCELDFDECHSNPCRNGATCVDGFNTFRCLCLPSYVGALCEQDTETCDYGWHKFQGQCYKYFAHRRTWDAAERECRLQGAHLTSILSHEEQMFVNRVGHDYQWIGLNDKMFEHDFRWTDGSTLQYENWRPNQPDSFFSAGEDCVVIIWHENGQWNDVPCNYHLTYTCKKGTVACGQPPVVENAKTFGKMKPRYEINSLIRYHCKDGFIQRHLPTIRCLGNGRWAIPKITCMNPSAYQRTYSMKYFKNSSSAKDNSINTSKHDHRWSRRWQESRR

SEQ ID NO: 129 - protein, 3396 aa, Homo sapiens
MFINIKSILWMCSTLIVTHALHKVKVGKSPPVRGSLSGKVSLPCHFSTMPTLPPSYNTSEFLRIKWSKIEVDKNGKDLKETTVLVAQNGNIKIGQDYKGRVSVPTHPEAVGDASLTVVKLLASDAGLYRCDVMYGIEDTQDTVSLTVDGVVFHYRAATSRYTLNFEAAQKACLDVGAVIATPEQLFAAYEDGFEQCDAGWLADQTVRYPIRAPRVGCYGDKMGKAGVRTYGFRSPQETYDVYCYVDHLDGDVFHLTVPSKFTFEEAAKECENQDARLATVGELQAAWRNGFDQCDYGWLSDASVRHPVTVARAQCGGGLLGVRTLYRFENQTGFPPPDSRFDAYCFKPKEATTIDLSILAETASPSLSKEPQMVSDRTTPIIPLVDELPVIPTEFPPVGNIVSFEQKATVQPQAITDSLATKLPTPTGSTKKPWDMDDYSPSASGPLGKLDISEIKEEVLQSTTGVSHYATDSWDGVVEDKQTQESVTQIEQIEVGPLVTSMEILKHIPSKEFPVTETPLVTARMILESKTEKKMVSTVSELVTTGHYGFTLGEEDDEDRTLTVGSDESTLIFDQIPEVITVSKTSEDTIHTHLEDLESVSASTTVSPLIMPDNNGSSMDDWEERQTSGRITEEFLGKYLSTTPFPSQHRTEIELFPYSGDKILVEGISTVIYPSLQTEMTHRRERTETLIPEMRTDTYTDEIQEEITKSPFMGKTEEEVFSGMKLSTSLSEPIHVTESSVEMTKSFDFPTLITKLSAEPTEVRDMEEDFTATPGTTKYDENITTVLLAHGTLSVEAATVSKWSWDEDNTTSKPLESTEPSASSKLPPALLTTVGMNGKDKDIPSFTEDGADEFTLIPDSTQKQLEEVTDEDIAAHGKFTIRFQPTTSTGIAEKSTLRDSTTEEKVPPITSTEGQVYATMEGSALGEVEDVDLSKPVSTVPQFAHTSEVEGLAFVSYSSTQEPTTYVDSSHTIPLSVIPKTDWGVLVPSVPSEDEVLGEPSQDILVIDQTRLEATISPETMRTTKITEGTTQEEFPWKEQTAEKPVPALSSTAWTPKEAVTPLDEQEGDGSAYTVSEDELLTGSERVPVLETTPVGKIDHSVSYPPGAVTEHKVKTDEVVTLTPRIGPKVSLSPGPEQKYETEGSSTTGFTSSLSPFSTHITQLMEETTTEKTSLEDIDLGSGLFEKPKATELIEFSTIKVTVPSDITTAFSSVDRLHTTSAFKPSSAITKKPPLIDREPGEETTSDMVIIGESTSHVPPTTLEDIVAKETETDIDREYFTTSSPPATQPTRPPTVEDKEAFGPQALSTPQPPASTKFHPDINVYIIEVRENKTGRMSDLSVIGHPIDSESKEDEPCSEETDPVHDLMAEILPEFPDIIEIDLYHSEENEEEEEECANATDVTTTPSVQYINGKHLVTTVPKDPEAAEARRGQFESVAPSQNFSDSSESDTHPFVIAKTELSTAVQPNESTETTESLEVTWKPETYPETSEHFSGGEPDVFPTVPFHEEFESGTAKKGAESVTERDTEVGHQAHEHTEPVSLFPEESSGEIAIDQESQKIAFARATEVTFGEEVEKSTSVTYTPTIVPSSASAYVSEEEAVTLIGNPWPDDLLSTKESWVEATPRQVVELSGSSSIPITEGSGEAEEDEDTMFTMVTDLSQRNTTDTLITLDTSRIITESFFEVPATTIYPVSEQPSAKVVPTKFVSETDTSEWISSTTVEEKKRKEEEGTTGTASTFEVYSSTQRSDQLILPFELESPNVATSSDSGTRKSFMSLTTPTQSEREMTDSTPVFTETNTLENLGAQTTEHSSIHQPGVQEGLTTLPRSPASVFMEQGSGEAAADPETTTVSSFSLNVEYAIQAEKEVAGTLSPHVETTFSTEPTGLVLSTVMDRVVAENITQTSREIVISERLGEPNYGAEIRGFSTGFPLEEDFSGDFREYSTVSHPIAKEETVMMEGSGDAAFRDTQTSPSTVPTSVHISHISDSEGPSSTMVSTSAFPWEEFTSSAEGSGEQLVTVSSSVVPVLPSAVQKFSGTASSIIDEGLGEVGTVNEIDRRSTILPTAEVEGTKAPVEKEEVKVSGTVSTNFPQTIEPAKLWSRQEVNPVRQEIESETTSEEQIQEEKSFESPQNSPATEQTIFDSQTFTETELKTTDYSVLTTKKTYSDDKEMKEEDTSLVNMSTPDPDANGLESYTTLPEATEKSHFFLATALVTESIPAEHVVTDSPIKKEESTKHFPKGMRPTIQESDTELLFSGLGSGEEVLPTLPTESVNFTEVEQINNTLYPHTSQVESTSSDKIEDFNRMENVAKEVGPLVSQTDIFEGSGSVTSTTLIEILSDTGAEGPTVAPLPFSTDIGHPQNQTVRWAEEIQTSRPQTITEQDSNKNSSTAEINETTTSSTDFLARAYGFEMAKEFVTSAPKPSDLYYEPSGEGSGEVDIVDSFHTSATTQATRQESSTTFVSDGSLEKHPEVPSAKAVTADGFPTVSVMLPLHSEQNKSSPDPTSTLSNTVSYERSTDGSFQDRFREFEDSTLKPNRKKPTENIIIDLDKEDKDLILTITESTILEILPELTSDKNTIIDIDHTKPVYEDILGMQTDIDTEVPSEPHDSNDESNDDSTQVQEIYEAAVNLSLTEETFEGSADVLASYTQATHDESMTYEDRSQLDHMGFHFTTGIPAPSTETELDVLLPTATSLPIPRKSATVIPEIEGIKAEAKALDDMFESSTLSDGQAIADQSEIIPTLGQFERTQEEYEDKKHAGPSFQPEFSSGAEEALVDHTPYLSIATTHLMDQSVTEVPDVMEGSNPPYYTDTTLAVSTFAKLSSQTPSSPLTIYSGSEASGHTEIPQPSALPGIDVGSSVMSPQDSFKEIHVNIEATFKPSSEEYLHITEPPSLSPDTKLEPSEDDGKPELLEEMEASPTELIAVEGTEILQDFQNKTDGQVSGEAIKMFPTIKTPEAGTVITTADEIELEGATQWPHSTSASATYGVEAGVVPWLSPQTSERPTLSSSPEINPETQAALIRGQDSTIAASEQQVAARILDSNDQATVNPVEFNTEVATPPFSLLETSNETDFLIGINEESVEGTAIYLPGPDRCKMNPCLNGGTCYPTETSYVCTCVPGYSGDQCELDFDECHSNPCRNGATCVDGFNTFRCLCLPSYVGALCEQDTETCDYGWHKFQGQCYKYFAHRRTWDAAERECRLQGAHLTSILSHEEQMFVNRVGHDYQWIGLNDKMFEHDFRWTDGSTLQYENWRPNQPDSFFSAGEDCVVIIWHENGQWNDVPCNYHLTYTCKKGTVACGQPPVVENAKTFGKMKPRYEINSLIRYHCKDGFIQRHLPTIRCLGNGRWAIPKITCMNPSAYQRTYSMKYFKNSSSAKDNSINTSKHDHRWSRRWQESRR

SEQ ID NO: 130 - DNA, 20 bp, Artificial Sequence
  VCAN_forward primer
tcctgtctcacgaagaacaa

SEQ ID NO: 131 - DNA, 20 bp, Artificial Sequence
  VCAN_reverse primer
atcagtccaacggaagtcat

SEQ ID NO: 132 - DNA, 26 bp, Artificial Sequence
  VCAN probe
tcgtgtgggccatgattatcagtgga

SEQ ID NO: 133 - DNA, 2465 bp, Homo sapiens
cctttcctccctccccgccctctccccgctgtcccctccccgtcggcccgcctgcccagcctttagcctcccgcccgccgcctctgtctccctctctccacaaactgcccaggagtgagtagctgctttcggtccgccggacacaccggacagatagacgtgcggacggcccaccaccccagcccgccaactagtcagcctgcgcctggcgcctcccctctccaggtccatccgccatgtggcccctgtggcgcctcgtgtctctgctggccctgagccaggccctgccctttgagcagagaggcttctgggacttcaccctggacgatgggccattcatgatgaacgatgaggaagcttcgggcgctgacacctcgggcgtcctggacccggactctgtcacacccacctacagcgccatgtgtcctttcggctgccactgccacctgcgggtggttcagtgctccgacctgggtctgaagtctgtgcccaaagagatctcccctgacaccacgctgctggacctgcagaacaacgacatctccgagctccgcaaggatgacttcaagggtctccagcacctctacgccctcgtcctggtgaacaacaagatctccaagatccatgagaaggccttcagcccactgcggaagctgcagaagctctacatctccaagaaccacctggtggagatcccgcccaacctacccagctccctggtggagctccgcatccacgacaaccgcatccgcaaggtgcccaagggagtgttcagcgggctccggaacatgaactgcatcgagatgggcgggaacccactggagaacagtggctttgaacctggagccttcgatggcctgaagctcaactacctgcgcatctcagaggccaagctgactggcatccccaaagacctccctgagaccctgaatgaactccacctagaccacaacaaaatccaggccatcgaactggaggacctgcttcgctactccaagctgtacaggctgggcctaggccacaaccagatcaggatgatcgagaacgggagcctgagcttcctgcccaccctccgggagctccacttggacaacaacaagttggccagggtgccctcagggctcccagacctcaagctcctccaggtggtctatctgcactccaacaacatcaccaaagtgggtgtcaacgacttctgtcccatgggcttcggggtgaagcgggcctactacaacggcatcagcctcttcaacaaccccgtgccctactgggaggtgcagccggccactttccgctgcgtcactgaccgcctggccatccagtttggcaactacaaaaagtagaggcagctgcagccaccgcggggcctcagtgggggtctctggggaacacagccagacatcctgatggggaggcagagccaggaagctaagccagggcccagctgcgtccaacccagccccccacctcgggtccctgaccccagctcgatgccccatcaccgcctctccctggctcccaagggtgcaggtgggcgcaaggcccggcccccatcacatgttcccttggcctcagagctgcccctgctctcccaccacagccacccagaggcaccccatgaagcttttttctcgttcactcccaaacccaagtgtccaaggctccagtcctaggagaacagtccctgggtcagcagccaggaggcggtccataagaatggggacagtgggctctgccagggctgccgcacctgtccagacacacatgttctgttcctcctcctcatgcatttccagcctttcaaccctccccgactctgcggctcccctcagcccccttgcaagttcatggcctgtccctcccagacccctgctccactggcccttcgaccagtcctcccttctgttctctctttccccgtccttcctctctctctctctctctctctctctctctttctgtgtgtgtgtgtgtgtgtgtgtgtgtgtgtgtgtgtgtgtgtgtcttgtgcttcctcagacctttctcgcttctgagcttggtggcctgttccctccatctctccgaacctggcttcgcctgtccctttcactccacaccctctggccttctgccttgagctgggactgctttctgtctgtccggcctgcacccagcccctgcccacaaaaccccagggacagcagtctccccagcctgccctgctcaggccttgcccccaaacctgtactgtcccggaggaggttgggaggtggaggcccagcatcccgcgcagatgacaccatcaaccgccagagtcccagacaccggttttcctagaagcccctcacccccactggcccactggtggctaggtctccccttatccttctggtccagcgcaaggaggggctgcttctgaggtcggtggctgtctttccattaaagaaacaccgtgcaacgtgaaaaaaaaaaaaaaaaaaaaa

SEQ ID NO: 134 - protein, 368 aa, Homo sapiens
MWPLWRLVSLLALSQALPFEQRGFWDFTLDDGPFMMNDEEASGADTSGVLDPDSVTPTYSAMCPFGCHCHLRVVQCSDLGLKSVPKEISPDTTLLDLQNNDISELRKDDFKGLQHLYALVLVNNKISKIHEKAFSPLRKLQKLYISKNHLVEIPPNLPSSLVELRIHDNRIRKVPKGVFSGLRNMNCIEMGGNPLENSGFEPGAFDGLKLNYLRISEAKLTGIPKDLPETLNELHLDHNKIQAIELEDLLRYSKLYRLGLGHNQIRMIENGSLSFLPTLRELHLDNNKLARVPSGLPDLKLLQVVYLHSNNITKVGVNDFCPMGFGVKRAYYNGISLFNNPVPYWEVQPATFRCVTDRLAIQFGNYKK

SEQ ID NO: 135 - DNA, 17 bp, Artificial Sequence
  BGN_forward primer
tgcccaagggagtgttc

SEQ ID NO: 136 - DNA, 20 bp, Artificial Sequence
  BGN_reverse primer
tagttgagcttcaggccatc

SEQ ID NO: 137 - DNA, 20 bp, Artificial Sequence
  BGN probe
atgggcgggaacccactgga

SEQ ID NO: 138 - DNA, 2537 bp, Homo sapiens
cccagaaggccgcggggggtggaccgcctaagagggcgtgcgctcccgacatgccccgcggcgcgccattaaccgccagatttgaatcgcgggacccgttggcagaggtggcggcggcggcatgggtgccccgacgttgccccctgcctggcagccctttctcaaggaccaccgcatctctacattcaagaactggcccttcttggagggctgcgcctgcaccccggagcggatggccgaggctggcttcatccactgccccactgagaacgagccagacttggcccagtgtttcttctgcttcaaggagctggaaggctgggagccagatgacgaccccatgcaaaggaaaccaacaataagaagaaagaatttgaggaaactgcggagaaagtgcgccgtgccatcgagcagctggctgccatggattgaggcctctggccggagctgcctggtcccagagtggctgcaccacttccagggtttattccctggtgccaccagccttcctgtgggccccttagcaatgtcttaggaaaggagatcaacattttcaaattagatgtttcaactgtgctcttgttttgtcttgaaagtggcaccagaggtgcttctgcctgtgcagcgggtgctgctggtaacagtggctgcttctctctctctctctcttttttgggggctcatttttgctgttttgattcccgggcttaccaggtgagaagtgagggaggaagaaggcagtgtcccttttgctagagctgacagctttgttcgcgtgggcagagccttccacagtgaatgtgtctggacctcatgttgttgaggctgtcacagtcctgagtgtggacttggcaggtgcctgttgaatctgagctgcaggttccttatctgtcacacctgtgcctcctcagaggacagtttttttgttgttgtgtttttttgtttttttttttttggtagatgcatgacttgtgtgtgatgagagaatggagacagagtccctggctcctctactgtttaacaacatggctttcttattttgtttgaattgttaattcacagaatagcacaaactacaattaaaactaagcacaaagccattctaagtcattggggaaacggggtgaacttcaggtggatgaggagacagaatagagtgataggaagcgtctggcagatactccttttgccactgctgtgtgattagacaggcccagtgagccgcggggcacatgctggccgctcctccctcagaaaaaggcagtggcctaaatcctttttaaatgacttggctcgatgctgtgggggactggctgggctgctgcaggccgtgtgtctgtcagcccaaccttcacatctgtcacgttctccacacgggggagagacgcagtccgcccaggtccccgctttctttggaggcagcagctcccgcagggctgaagtctggcgtaagatgatggatttgattcgccctcctccctgtcatagagctgcagggtggattgttacagcttcgctggaaacctctggaggtcatctcggctgttcctgagaaataaaaagcctgtcatttcaaacactgctgtggaccctactgggtttttaaaatattgtcagtttttcatcgtcgtccctagcctgccaacagccatctgcccagacagccgcagtgaggatgagcgtcctggcagagacgcagttgtctctgggcgcttgccagagccacgaaccccagacctgtttgtatcatccgggctccttccgggcagaaacaactgaaaatgcacttcagacccacttatttctgccacatctgagtcggcctgagatagacttttccctctaaactgggagaatatcacagtggtttttgttagcagaaaatgcactccagcctctgtactcatctaagctgcttatttttgatatttgtgtcagtctgtaaatggatacttcactttaataactgttgcttagtaattggctttgtagagaagctggaaaaaaatggttttgtcttcaactcctttgcatgccaggcggtgatgtggatctcggcttctgtgagcctgtgctgtgggcagggctgagctggagccgcccctctcagcccgcctgccacggcctttccttaaaggccatccttaaaaccagaccctcatggctaccagcacctgaaagcttcctcgacatctgttaataaagccgtaggcccttgtctaagtgcaaccgcctagactttctttcagatacatgtccacatgtccatttttcaggttctctaagttggagtggagtctgggaagggttgtgaatgaggcttctgggctatgggtgaggttccaatggcaggttagagcccctcgggccaactgccatcctggaaagtagagacagcagtgcccgctgcccagaagagaccagcaagccaaactggagcccccattgcaggctgtcgccatgtggaaagagtaactcacaattgccaataaagtctcatgtggttttatctaaaaaaaaaaaaaaaaaaaaaaaaa

SEQ ID NO: 139 - DNA, 2724 bp, Homo sapiens
cccagaaggccgcggggggtggaccgcctaagagggcgtgcgctcccgacatgccccgcggcgcgccattaaccgccagatttgaatcgcgggacccgttggcagaggtggcggcggcggcatgggtgccccgacgttgccccctgcctggcagccctttctcaaggaccaccgcatctctacattcaagaactggcccttcttggagggctgcgcctgcaccccggagcggatggccgaggctggcttcatccactgccccactgagaacgagccagacttggcccagtgtttcttctgcttcaaggagctggaaggctgggagccagatgacgaccccattgggccgggcacggtggcttacgcctgtaataccagcactttgggaggccgaggcgggcggatcacgagagaggaacataaaaagcattcgtccggttgcgctttcctttctgtcaagaagcagtttgaagaattaacccttggtgaatttttgaaactggacagagaaagagccaagaacaaaattgcaaaggaaaccaacaataagaagaaagaatttgaggaaactgcggagaaagtgcgccgtgccatcgagcagctggctgccatggattgaggcctctggccggagctgcctggtcccagagtggctgcaccacttccagggtttattccctggtgccaccagccttcctgtgggccccttagcaatgtcttaggaaaggagatcaacattttcaaattagatgtttcaactgtgctcttgttttgtcttgaaagtggcaccagaggtgcttctgcctgtgcagcgggtgctgctggtaacagtggctgcttctctctctctctctcttttttgggggctcatttttgctgttttgattcccgggcttaccaggtgagaagtgagggaggaagaaggcagtgtcccttttgctagagctgacagctttgttcgcgtgggcagagccttccacagtgaatgtgtctggacctcatgttgttgaggctgtcacagtcctgagtgtggacttggcaggtgcctgttgaatctgagctgcaggttccttatctgtcacacctgtgcctcctcagaggacagtttttttgttgttgtgtttttttgtttttttttttttggtagatgcatgacttgtgtgtgatgagagaatggagacagagtccctggctcctctactgtttaacaacatggctttcttattttgtttgaattgttaattcacagaatagcacaaactacaattaaaactaagcacaaagccattctaagtcattggggaaacggggtgaacttcaggtggatgaggagacagaatagagtgataggaagcgtctggcagatactccttttgccactgctgtgtgattagacaggcccagtgagccgcggggcacatgctggccgctcctccctcagaaaaaggcagtggcctaaatcctttttaaatgacttggctcgatgctgtgggggactggctgggctgctgcaggccgtgtgtctgtcagcccaaccttcacatctgtcacgttctccacacgggggagagacgcagtccgcccaggtccccgctttctttggaggcagcagctcccgcagggctgaagtctggcgtaagatgatggatttgattcgccctcctccctgtcatagagctgcagggtggattgttacagcttcgctggaaacctctggaggtcatctcggctgttcctgagaaataaaaagcctgtcatttcaaacactgctgtggaccctactgggtttttaaaatattgtcagtttttcatcgtcgtccctagcctgccaacagccatctgcccagacagccgcagtgaggatgagcgtcctggcagagacgcagttgtctctgggcgcttgccagagccacgaaccccagacctgtttgtatcatccgggctccttccgggcagaaacaactgaaaatgcacttcagacccacttatttctgccacatctgagtcggcctgagatagacttttccctctaaactgggagaatatcacagtggtttttgttagcagaaaatgcactccagcctctgtactcatctaagctgcttatttttgatatttgtgtcagtctgtaaatggatacttcactttaataactgttgcttagtaattggctttgtagagaagctggaaaaaaatggttttgtcttcaactcctttgcatgccaggcggtgatgtggatctcggcttctgtgagcctgtgctgtgggcagggctgagctggagccgcccctctcagcccgcctgccacggcctttccttaaaggccatccttaaaaccagaccctcatggctaccagcacctgaaagcttcctcgacatctgttaataaagccgtaggcccttgtctaagtgcaaccgcctagactttctttcagatacatgtccacatgtccatttttcaggttctctaagttggagtggagtctgggaagggttgtgaatgaggcttctgggctatgggtgaggttccaatggcaggttagagcccctcgggccaactgccatcctggaaagtagagacagcagtgcccgctgcccagaagagaccagcaagccaaactggagcccccattgcaggctgtcgccatgtggaaagagtaactcacaattgccaataaagtctcatgtggttttatctaaaaaaaaaaaaaaaaaaaaaaaaa

SEQ ID NO: 140 - DNA, 2655 bp, Homo sapiens
cccagaaggccgcggggggtggaccgcctaagagggcgtgcgctcccgacatgccccgcggcgcgccattaaccgccagatttgaatcgcgggacccgttggcagaggtggcggcggcggcatgggtgccccgacgttgccccctgcctggcagccctttctcaaggaccaccgcatctctacattcaagaactggcccttcttggagggctgcgcctgcaccccggagcggatggccgaggctggcttcatccactgccccactgagaacgagccagacttggcccagtgtttcttctgcttcaaggagctggaaggctgggagccagatgacgaccccatagaggaacataaaaagcattcgtccggttgcgctttcctttctgtcaagaagcagtttgaagaattaacccttggtgaatttttgaaactggacagagaaagagccaagaacaaaattgcaaaggaaaccaacaataagaagaaagaatttgaggaaactgcggagaaagtgcgccgtgccatcgagcagctggctgccatggattgaggcctctggccggagctgcctggtcccagagtggctgcaccacttccagggtttattccctggtgccaccagccttcctgtgggccccttagcaatgtcttaggaaaggagatcaacattttcaaattagatgtttcaactgtgctcttgttttgtcttgaaagtggcaccagaggtgcttctgcctgtgcagcgggtgctgctggtaacagtggctgcttctctctctctctctcttttttgggggctcatttttgctgttttgattcccgggcttaccaggtgagaagtgagggaggaagaaggcagtgtcccttttgctagagctgacagctttgttcgcgtgggcagagccttccacagtgaatgtgtctggacctcatgttgttgaggctgtcacagtcctgagtgtggacttggcaggtgcctgttgaatctgagctgcaggttccttatctgtcacacctgtgcctcctcagaggacagtttttttgttgttgtgtttttttgtttttttttttttggtagatgcatgacttgtgtgtgatgagagaatggagacagagtccctggctcctctactgtttaacaacatggctttcttattttgtttgaattgttaattcacagaatagcacaaactacaattaaaactaagcacaaagccattctaagtcattggggaaacggggtgaacttcaggtggatgaggagacagaatagagtgataggaagcgtctggcagatactccttttgccactgctgtgtgattagacaggcccagtgagccgcggggcacatgctggccgctcctccctcagaaaaaggcagtggcctaaatcctttttaaatgacttggctcgatgctgtgggggactggctgggctgctgcaggccgtgtgtctgtcagcccaaccttcacatctgtcacgttctccacacgggggagagacgcagtccgcccaggtccccgctttctttggaggcagcagctcccgcagggctgaagtctggcgtaagatgatggatttgattcgccctcctccctgtcatagagctgcagggtggattgttacagcttcgctggaaacctctggaggtcatctcggctgttcctgagaaataaaaagcctgtcatttcaaacactgctgtggaccctactgggtttttaaaatattgtcagtttttcatcgtcgtccctagcctgccaacagccatctgcccagacagccgcagtgaggatgagcgtcctggcagagacgcagttgtctctgggcgcttgccagagccacgaaccccagacctgtttgtatcatccgggctccttccgggcagaaacaactgaaaatgcacttcagacccacttatttctgccacatctgagtcggcctgagatagacttttccctctaaactgggagaatatcacagtggtttttgttagcagaaaatgcactccagcctctgtactcatctaagctgcttatttttgatatttgtgtcagtctgtaaatggatacttcactttaataactgttgcttagtaattggctttgtagagaagctggaaaaaaatggttttgtcttcaactcctttgcatgccaggcggtgatgtggatctcggcttctgtgagcctgtgctgtgggcagggctgagctggagccgcccctctcagcccgcctgccacggcctttccttaaaggccatccttaaaaccagaccctcatggctaccagcacctgaaagcttcctcgacatctgttaataaagccgtaggcccttgtctaagtgcaaccgcctagactttctttcagatacatgtccacatgtccatttttcaggttctctaagttggagtggagtctgggaagggttgtgaatgaggcttctgggctatgggtgaggttccaatggcaggttagagcccctcgggccaactgccatcctggaaagtagagacagcagtgcccgctgcccagaagagaccagcaagccaaactggagcccccattgcaggctgtcgccatgtggaaagagtaactcacaattgccaataaagtctcatgtggttttatctaaaaaaaaaaaaaaaaaaaaaaaaa

SEQ ID NO: 141 - protein, 137 aa, Homo sapiens
MGAPTLPPAWQPFLKDHRISTFKNWPFLEGCACTPERMAEAGFIHCPTENEPDLAQCFFCFKELEGWEPDDDPMQRKPTIRRKNLRKLRRKCAVPSSSWLPWIEASGRSCLVPEWLHHFQGLFPGATSLPVGPLAMS

SEQ ID NO: 142 - protein, 165 aa, Homo sapiens
MGAPTLPPAWQPFLKDHRISTFKNWPFLEGCACTPERMAEAGFIHCPTENEPDLAQCFFCFKELEGWEPDDDPIGPGTVAYACNTSTLGGRGGRITREEHKKHSSGCAFLSVKKQFEELTLGEFLKLDRERAKNKIAKETNNKKKEFEETAEKVRRAIEQLAAMD

SEQ ID NO: 143 - protein, 142 aa, Homo sapiens
MGAPTLPPAWQPFLKDHRISTFKNWPFLEGCACTPERMAEAGFIHCPTENEPDLAQCFFCFKELEGWEPDDDPIEEHKKHSSGCAFLSVKKQFEELTLGEFLKLDRERAKNKIAKETNNKKKEFEETAEKVRRAIEQLAAMD

SEQ ID NO: 144 - DNA, 18 bp, Artificial Sequence
  BIRC5_forward primer
cttggcccagtgtttctt

SEQ ID NO: 145 - DNA, 21 bp, Artificial Sequence
  BIRC5_reverse primer
gttcctctatggggtcgtcat

SEQ ID NO: 146 - DNA, 20 bp, Artificial Sequence
  BIRC5 probe
agctggaaggctgggagcca

SEQ ID NO: 147 - DNA, 6010 bp, Homo sapiens
cgcgggggcgcgcgcgcgcgggcccgggagaggctcccgagccaggcggtcttcggtcctcgcagcgcttccagctccccgcgcccctatgtgagggagacggggaggcccgcggcgcgcaggggagggcgaggcatgtgcacgggccggagggtgctgcagccgcccgaggaagaggaggacggcggcgaggaggagagcggggggctcgcggcggcgggccccggccgaggggatgcagtggactgtgtgtgtctggctgtagcagacgcgaggcggcgacgaggcgccggggacccgcgcgaggggcggccgggaggcggcggcggcggccgccagaagtagcagcaggaccggcggcggcgacggcagccctgaaatgcattttcctctccagcggccatgttaaccaggaaaccttcggccgccgctcccgccgcctacccgaccgattggcggcagtaagcacacaatgaatgatcacctgcatgtcggcagccacgctcacggacagatccaggttcaacagttgtttgaggataacagtaacaagcggacagtgctcacgacacaaccaaatgggcttacaacagtgggcaaaacgggcttgccagtggtgccagagcggcagctggacagcattcatagacggcaggggagctccacctctctaaagtccatggaaggcatggggaaggtgaaagccacccccatgacacctgaacaagcaatgaagcaatacatgcaaaaactcacagccttcgaacaccatgagattttcagctaccctgaaatatatttcttgggtctaaatgctaagaagcgccagggcatgacaggtgggcccaacaatggtggctatgatgatgaccagggatcatatgtgcaggtgccccacgatcacgtggcttacaggtatgaggtcctcaaggtcattgggaaggggagctttgggcaggtggtcaaggcctacgatcacaaagtccaccagcacgtggccctaaagatggtgcggaatgagaagcgcttccaccggcaagcagcggaggagatccgaatcctggaacacctgcggaagcaggacaaggataacacaatgaatgtcatccatatgctggagaatttcaccttccgcaaccacatctgcatgacgtttgagctgctgagcatgaacctctatgagctcatcaagaagaataaattccagggcttcagtctgcctttggttcgcaagtttgcccactcgattctgcagtgcttggatgctttgcacaaaaacagaataattcactgtgaccttaagcccgagaacattttgttaaagcagcagggtagaagcggtattaaagtaattgattttggctccagttgttacgagcatcagcgtgtctacacgtacatccagtcgcgtttttaccgggctccagaagtgatccttggggccaggtatggcatgcccattgatatgtggagcctgggctgcattttagcagagctcctgacgggttaccccctcttgcctggggaagatgaaggggaccagctggcctgtatgattgaactgttgggcatgccctcacagaaactgctggatgcatccaaacgagccaaaaattttgtgagctccaagggttatccccgttactgcactgtcacgactctctcagatggctctgtggtcctaaacggaggccgttcccggagggggaaactgaggggcccaccggagagcagagagtgggggaacgcgctgaaggggtgtgatgatccccttttccttgacttcttaaaacagtgtttagagtgggatcctgcagtgcgcatgaccccaggccaggctttgcggcacccctggctgaggaggcggttgccaaagcctcccaccggggagaaaacgtcagtgaaaaggataactgagagcaccggtgctatcacatctatatccaagttacctccaccttctagctcagcttccaaactgaggactaatttggcgcagatgacagatgccaatgggaatattcagcagaggacagtgttgccaaaacttgttagctgagctcacgtcccctgatgctggtaacctgaaagatacgacattgctgagccttactgggttgaaaaggagtagctcagacctgtttttatttgctcaataactctactcatttgtatcttttcagcacttaattttaatgtaagaaagttgttcattttgtttttataaaatacatgaggacaatgctttaagtttttatactttcagaaactttttgtgttctaaaagtacaatgagccttactgtatttagtgtggcagaataataacatcagtggcaggccactgattacttcatgactgccacgcatttacagattggtgtcaaagacattcactatgtttttatggttcatgttatatcctccccagggtgacagccccttaaggccctccttttccctccatgctccaggtccatgcacaggtgtagcatgtcctgcttccgtttttcataaattaatctgggtgttgggggtagtgggaggagaacggtcagaatcaaagtgacattctaagaaaaactgtaccttagagattttcctctagtgctcaaacaaatacaaaataagatccccaaggtttaaactgcccagttagcattctgacattctaaaagccggcaaagcagcttttagtggataaatgggaatggaaacgtgtgtgttcctccaaattttctagtatgatcggtgagctgttttgtaaagaagcctcatattacagagttgcttttgcacctaaatttagaattgtattccatgaactgttcctcccttttctctgcttttctcctctctgttcctcttttaataccacacgtctgttgcttgcatttagtttgtcttcttccttcagctgtgtatcccagactgttaatacagaaaagagacatttcagctgtgattatgaccattgtttcatattccaattaaaaaaagaacagcagcctagctacttaaggtggggatttccatagttccaaagaagatttagcagattagagtgagttcacacttttcaggtgccactgtaaggttctctcagcctgggaaactatcaactctttctttaaaaagaaagagggttgaaaatcctctggacgaacagaagtcactttggctgttcagtaaggccaatgttaacaacacgtttagaggaggaaaagttcaacctcaagttaaatggtttgacttattcttcgtatcattagaagaaccccagagatagcattcctctattttattttactttcttttggattgcactgattgtttttgtgggaatgacactttatctggcaaagtaactgagagtttggtaaaagaatattttcttctctgaataataattattttcacagtgaaaatttcagtattttatcactaatgtatgagcaatgatctatatcaatttcaaggcacgtgaaaaaaattttttagtatgtgcaatttaatatagaaagatttctgcctgtttggacaataggttttgggtagtacagattaggataagtaagcttatatatgcacagagattattgtattacctgtaaattgatttacaagtacttaaaagcgtggtccccagtgaggccaagaaagtttccggttaagttctttaataataatcctacagtttatcttaagaaaaaaaaaaaggtttgaaaaaaacactttaatttaggcttcgttggttgatggtggaaaaaaatgctcaggaaatatttcagatatttgccaaaaaaccagtaataaggttaccttattaaaatagtgatatttgctttactatttaaggtgtcactgataaattaatttgtacttctgtgtttagaaattatagcttcttttcccttagtcaaattttttagcatattatacacatttctgtgtaatctgtggaagtgcaataatatgttagtaagttacattttaaataatgctcatgtgacaatactcccaatcaatggcttatagaatttaaagatctgtatattagattttggcttaaaggcatgagaagtataagacttggtttggtggctttgtaagaccaccagcctcttaatgatggttagcttctttaggtcattaaatcaataaaaacatataatgctgttttgctcttctaatgctcctcttccatttccagttatcttcacatttacatttaaatatacaaacctgagcctgccattattaatttccctataaaatgacgatacatgtgaacatttataaatggactaatactgcttgtctttcccccaccgcacaaaactggttcttaagatgccagcaatgaatttgagactatctttatttataaatggaaaccggaaacttttataccaaactataataatgtgcagcactgtagggcttttttttttttccctccaaatacagtgaaatttttttattcacaagagctgccacatctcagcatttagtaatagagctgctttaataaaattctagtttgattgtcatgtcaaaaaaagaaaaatgttgcatctttgtgattttaaaacataaattaatgaaggctctgataggctattaggagttggcttggaaacagtttttggtctcacaggttaccattgtttggggatgtctgagctgttttcagatctaggaatagcacagtgttgtcttgtctttggcagtctcatttggctctgtttcttgcaccaccagcgtgttcattaccacttaaatatattgctacagcagtggaacaacagagtggtgcaagacactgtagattaacggtagaggagaaattgtgcccttagtgttaacaatgtgccttttgttctgaatgccatgttgtagggcatgcattttttggcctctttaactcttcgaattctagtcagtaagaatggaacccatctctgcaaagatacatctgtcttaaatatctagttacaggccttaatagaaaccataaggcatgactcatcttcaggcactgaaaaaagataaccatcaggtagtgttacacaaggacttcctatatttaaggggttaaagatggtctttgttgtatcttaacatcagactgatttttacattttttttttgttatgctaacactagacaaaaatcaactgtatttgtaaaaatttacctcaaaccatttaattttatagtgtgattaatcccagggcatttggtatgaaccaaagtgcattccttttatatgtgcctggctctagtaaggatggccagggatttttacaatttgggtgcaaggcacttaagccacttttaaacttaatgggtggtttggggtcgtgttaaatgactccatcagaatgttagaaaacactttaggcatcagtagcattgggccatattggaatcctaaagtgtgaattattttaaggagagcattcatttttgtaatttttttcatcaaaaatatttctggtaagcagaagactttttaaaaaaactgatctggtctcggtaaaggttttaatattgcccaacataatgctgtaatagcattaaaaaaagtatttgtgaactctgtttcttaggggcttgtacatctctctgctatggacatacataaaattaattgtaattatactcagctcaactgctacagttctgtctaggcagtggcttgggtttttatcgagcaacaacttagacacgtgactgtaatatgctgcaactgtgtgtactgaaaatatgtgaaaatggttgaatgtggactgtgtatatatgtatgtaaaaatttctgtgagatgctgctgtcgccacttaacattaaatatgttctagtggattttaatcctagtggccagttctatgatactgtatgtattatacagctgatgacaggagtaagactgtttagtgaatatctgttaaattttattgttgtggccagagataatttcagaataaaattttaatgtcctacctta

SEQ ID NO: 148 - DNA, 6159 bp, Homo sapiens
cgcgggggcgcgcgcgcgcgggcccgggagaggctcccgagccaggcggtcttcggtcctcgcagcgcttccagctccccgcgcccctatgtgagggagacggggaggcccgcggcgcgcaggggagggcgaggcatgtgcacgggccggagggtgctgcagccgcccgaggaagaggaggacggcggcgaggaggagagcggggggctcgcggcggcgggccccggccgaggggatgcagtggactgtgtgtgtctggctgtagcagacgcgaggcggcgacgaggcgccggggacccgcgcgaggggcggccgggaggcggcggcggcggccgccagaagtagcagcaggaccggcggcggcgacggcagccctgaaatgcattttcctctccagcggccatgttaaccaggaaaccttcggccgccgctcccgccgcctacccgaccggccgaggtggggacagcgccgttcgtcagcttcaggcttccccggggctcggtgcaggggccacccggagcggagtggggactggcccgccctcccccatcgccctgccgcctctccgggccagcaacgctgccgccgcagcccacacgattggcggcagtaagcacacaatgaatgatcacctgcatgtcggcagccacgctcacggacagatccaggttcaacagttgtttgaggataacagtaacaagcggacagtgctcacgacacaaccaaatgggcttacaacagtgggcaaaacgggcttgccagtggtgccagagcggcagctggacagcattcatagacggcaggggagctccacctctctaaagtccatggaaggcatggggaaggtgaaagccacccccatgacacctgaacaagcaatgaagcaatacatgcaaaaactcacagccttcgaacaccatgagattttcagctaccctgaaatatatttcttgggtctaaatgctaagaagcgccagggcatgacaggtgggcccaacaatggtggctatgatgatgaccagggatcatatgtgcaggtgccccacgatcacgtggcttacaggtatgaggtcctcaaggtcattgggaaggggagctttgggcaggtggtcaaggcctacgatcacaaagtccaccagcacgtggccctaaagatggtgcggaatgagaagcgcttccaccggcaagcagcggaggagatccgaatcctggaacacctgcggaagcaggacaaggataacacaatgaatgtcatccatatgctggagaatttcaccttccgcaaccacatctgcatgacgtttgagctgctgagcatgaacctctatgagctcatcaagaagaataaattccagggcttcagtctgcctttggttcgcaagtttgcccactcgattctgcagtgcttggatgctttgcacaaaaacagaataattcactgtgaccttaagcccgagaacattttgttaaagcagcagggtagaagcggtattaaagtaattgattttggctccagttgttacgagcatcagcgtgtctacacgtacatccagtcgcgtttttaccgggctccagaagtgatccttggggccaggtatggcatgcccattgatatgtggagcctgggctgcattttagcagagctcctgacgggttaccccctcttgcctggggaagatgaaggggaccagctggcctgtatgattgaactgttgggcatgccctcacagaaactgctggatgcatccaaacgagccaaaaattttgtgagctccaagggttatccccgttactgcactgtcacgactctctcagatggctctgtggtcctaaacggaggccgttcccggagggggaaactgaggggcccaccggagagcagagagtgggggaacgcgctgaaggggtgtgatgatccccttttccttgacttcttaaaacagtgtttagagtgggatcctgcagtgcgcatgaccccaggccaggctttgcggcacccctggctgaggaggcggttgccaaagcctcccaccggggagaaaacgtcagtgaaaaggataactgagagcaccggtgctatcacatctatatccaagttacctccaccttctagctcagcttccaaactgaggactaatttggcgcagatgacagatgccaatgggaatattcagcagaggacagtgttgccaaaacttgttagctgagctcacgtcccctgatgctggtaacctgaaagatacgacattgctgagccttactgggttgaaaaggagtagctcagacctgtttttatttgctcaataactctactcatttgtatcttttcagcacttaattttaatgtaagaaagttgttcattttgtttttataaaatacatgaggacaatgctttaagtttttatactttcagaaactttttgtgttctaaaagtacaatgagccttactgtatttagtgtggcagaataataacatcagtggcaggccactgattacttcatgactgccacgcatttacagattggtgtcaaagacattcactatgtttttatggttcatgttatatcctccccagggtgacagccccttaaggccctccttttccctccatgctccaggtccatgcacaggtgtagcatgtcctgcttccgtttttcataaattaatctgggtgttgggggtagtgggaggagaacggtcagaatcaaagtgacattctaagaaaaactgtaccttagagattttcctctagtgctcaaacaaatacaaaataagatccccaaggtttaaactgcccagttagcattctgacattctaaaagccggcaaagcagcttttagtggataaatgggaatggaaacgtgtgtgttcctccaaattttctagtatgatcggtgagctgttttgtaaagaagcctcatattacagagttgcttttgcacctaaatttagaattgtattccatgaactgttcctcccttttctctgcttttctcctctctgttcctcttttaataccacacgtctgttgcttgcatttagtttgtcttcttccttcagctgtgtatcccagactgttaatacagaaaagagacatttcagctgtgattatgaccattgtttcatattccaattaaaaaaagaacagcagcctagctacttaaggtggggatttccatagttccaaagaagatttagcagattagagtgagttcacacttttcaggtgccactgtaaggttctctcagcctgggaaactatcaactctttctttaaaaagaaagagggttgaaaatcctctggacgaacagaagtcactttggctgttcagtaaggccaatgttaacaacacgtttagaggaggaaaagttcaacctcaagttaaatggtttgacttattcttcgtatcattagaagaaccccagagatagcattcctctattttattttactttcttttggattgcactgattgtttttgtgggaatgacactttatctggcaaagtaactgagagtttggtaaaagaatattttcttctctgaataataattattttcacagtgaaaatttcagtattttatcactaatgtatgagcaatgatctatatcaatttcaaggcacgtgaaaaaaattttttagtatgtgcaatttaatatagaaagatttctgcctgtttggacaataggttttgggtagtacagattaggataagtaagcttatatatgcacagagattattgtattacctgtaaattgatttacaagtacttaaaagcgtggtccccagtgaggccaagaaagtttccggttaagttctttaataataatcctacagtttatcttaagaaaaaaaaaaaggtttgaaaaaaacactttaatttaggcttcgttggttgatggtggaaaaaaatgctcaggaaatatttcagatatttgccaaaaaaccagtaataaggttaccttattaaaatagtgatatttgctttactatttaaggtgtcactgataaattaatttgtacttctgtgtttagaaattatagcttcttttcccttagtcaaattttttagcatattatacacatttctgtgtaatctgtggaagtgcaataatatgttagtaagttacattttaaataatgctcatgtgacaatactcccaatcaatggcttatagaatttaaagatctgtatattagattttggcttaaaggcatgagaagtataagacttggtttggtggctttgtaagaccaccagcctcttaatgatggttagcttctttaggtcattaaatcaataaaaacatataatgctgttttgctcttctaatgctcctcttccatttccagttatcttcacatttacatttaaatatacaaacctgagcctgccattattaatttccctataaaatgacgatacatgtgaacatttataaatggactaatactgcttgtctttcccccaccgcacaaaactggttcttaagatgccagcaatgaatttgagactatctttatttataaatggaaaccggaaacttttataccaaactataataatgtgcagcactgtagggcttttttttttttccctccaaatacagtgaaatttttttattcacaagagctgccacatctcagcatttagtaatagagctgctttaataaaattctagtttgattgtcatgtcaaaaaaagaaaaatgttgcatctttgtgattttaaaacataaattaatgaaggctctgataggctattaggagttggcttggaaacagtttttggtctcacaggttaccattgtttggggatgtctgagctgttttcagatctaggaatagcacagtgttgtcttgtctttggcagtctcatttggctctgtttcttgcaccaccagcgtgttcattaccacttaaatatattgctacagcagtggaacaacagagtggtgcaagacactgtagattaacggtagaggagaaattgtgcccttagtgttaacaatgtgccttttgttctgaatgccatgttgtagggcatgcattttttggcctctttaactcttcgaattctagtcagtaagaatggaacccatctctgcaaagatacatctgtcttaaatatctagttacaggccttaatagaaaccataaggcatgactcatcttcaggcactgaaaaaagataaccatcaggtagtgttacacaaggacttcctatatttaaggggttaaagatggtctttgttgtatcttaacatcagactgatttttacattttttttttgttatgctaacactagacaaaaatcaactgtatttgtaaaaatttacctcaaaccatttaattttatagtgtgattaatcccagggcatttggtatgaaccaaagtgcattccttttatatgtgcctggctctagtaaggatggccagggatttttacaatttgggtgcaaggcacttaagccacttttaaacttaatgggtggtttggggtcgtgttaaatgactccatcagaatgttagaaaacactttaggcatcagtagcattgggccatattggaatcctaaagtgtgaattattttaaggagagcattcatttttgtaatttttttcatcaaaaatatttctggtaagcagaagactttttaaaaaaactgatctggtctcggtaaaggttttaatattgcccaacataatgctgtaatagcattaaaaaaagtatttgtgaactctgtttcttaggggcttgtacatctctctgctatggacatacataaaattaattgtaattatactcagctcaactgctacagttctgtctaggcagtggcttgggtttttatcgagcaacaacttagacacgtgactgtaatatgctgcaactgtgtgtactgaaaatatgtgaaaatggttgaatgtggactgtgtatatatgtatgtaaaaatttctgtgagatgctgctgtcgccacttaacattaaatatgttctagtggattttaatcctagtggccagttctatgatactgtatgtattatacagctgatgacaggagtaagactgtttagtgaatatctgttaaattttattgttgtggccagagataatttcagaataaaattttaatgtcctacctta

SEQ ID NO: 149 - protein, 528 aa, Homo sapiens
MNDHLHVGSHAHGQIQVQQLFEDNSNKRTVLTTQPNGLTTVGKTGLPVVPERQLDSIHRRQGSSTSLKSMEGMGKVKATPMTPEQAMKQYMQKLTAFEHHEIFSYPEIYFLGLNAKKRQGMTGGPNNGGYDDDQGSYVQVPHDHVAYRYEVLKVIGKGSFGQVVKAYDHKVHQHVALKMVRNEKRFHRQAAEEIRILEHLRKQDKDNTMNVIHMLENFTFRNHICMTFELLSMNLYELIKKNKFQGFSLPLVRKFAHSILQCLDALHKNRIIHCDLKPENILLKQQGRSGIKVIDFGSSCYEHQRVYTYIQSRFYRAPEVILGARYGMPIDMWSLGCILAELLTGYPLLPGEDEGDQLACMIELLGMPSQKLLDASKRAKNFVSSKGYPRYCTVTTLSDGSVVLNGGRSRRGKLRGPPESREWGNALKGCDDPLFLDFLKQCLEWDPAVRMTPGQALRHPWLRRRLPKPPTGEKTSVKRITESTGAITSISKLPPPSSSASKLRTNLAQMTDANGNIQQRTVLPKLVS

SEQ ID NO: 150 - protein, 601 aa, Homo sapiens
MLTRKPSAAAPAAYPTGRGGDSAVRQLQASPGLGAGATRSGVGTGPPSPIALPPLRASNAAAAAHTIGGSKHTMNDHLHVGSHAHGQIQVQQLFEDNSNKRTVLTTQPNGLTTVGKTGLPVVPERQLDSIHRRQGSSTSLKSMEGMGKVKATPMTPEQAMKQYMQKLTAFEHHEIFSYPEIYFLGLNAKKRQGMTGGPNNGGYDDDQGSYVQVPHDHVAYRYEVLKVIGKGSFGQVVKAYDHKVHQHVALKMVRNEKRFHRQAAEEIRILEHLRKQDKDNTMNVIHMLENFTFRNHICMTFELLSMNLYELIKKNKFQGFSLPLVRKFAHSILQCLDALHKNRIIHCDLKPENILLKQQGRSGIKVIDFGSSCYEHQRVYTYIQSRFYRAPEVILGARYGMPIDMWSLGCILAELLTGYPLLPGEDEGDQLACMIELLGMPSQKLLDASKRAKNFVSSKGYPRYCTVTTLSDGSVVLNGGRSRRGKLRGPPESREWGNALKGCDDPLFLDFLKQCLEWDPAVRMTPGQALRHPWLRRRLPKPPTGEKTSVKRITESTGAITSISKLPPPSSSASKLRTNLAQMTDANGNIQQRTVLPKLVS

SEQ ID NO: 151 - DNA, 21 bp, Artificial Sequence
  DYRK2_forward primer
cggccatgttaaccaggaaac

SEQ ID NO: 152 - DNA, 20 bp, Artificial Sequence
  DYRK2_reverse primer
cgacatgcaggtgatcattc

SEQ ID NO: 153 - DNA, 24 bp, Artificial Sequence
  DYRK2 probe
cgattggcggcagtaagcacacaa

SEQ ID NO: 154 - DNA, 1921 bp, Homo sapiens
ggcggaagtgacattatcaacgcgcgccaggggttcagtgaggtcgggcaggttcgctgtggcgggcgcctgggccgccggctgtttaacttcgcttccgctggcccatagtgatctttgcagtgacccagcatcactgtttcttggcgtgtgaagataacccaaggaattgaggaagttgctgagaagagtgtgctggagatgctctaggaaaaaattgaatagtgagacgagttccagcgcaagggtttctggtttgccaagaagaaagtgaacatcatggatcagaacaacagcctgccaccttacgctcagggcttggcctcccctcagggtgccatgactcccggaatccctatctttagtccaatgatgccttatggcactggactgaccccacagcctattcagaacaccaatagtctgtctattttggaagagcaacaaaggcagcagcagcaacaacaacagcagcagcagcagcagcagcagcaacagcaacagcagcagcagcagcagcagcagcagcagcagcagcagcagcagcagcagcagcagcaacaggcagtggcagctgcagccgttcagcagtcaacgtcccagcaggcaacacagggaacctcaggccaggcaccacagctcttccactcacagactctcacaactgcacccttgccgggcaccactccactgtatccctcccccatgactcccatgacccccatcactcctgccacgccagcttcggagagttctgggattgtaccgcagctgcaaaatattgtatccacagtgaatcttggttgtaaacttgacctaaagaccattgcacttcgtgcccgaaacgccgaatataatcccaagcggtttgctgcggtaatcatgaggataagagagccacgaaccacggcactgattttcagttctgggaaaatggtgtgcacaggagccaagagtgaagaacagtccagactggcagcaagaaaatatgctagagttgtacagaagttgggttttccagctaagttcttggacttcaagattcagaatatggtggggagctgtgatgtgaagtttcctataaggttagaaggccttgtgctcacccaccaacaatttagtagttatgagccagagttatttcctggtttaatctacagaatgatcaaacccagaattgttctccttatttttgtttctggaaaagttgtattaacaggtgctaaagtcagagcagaaatttatgaagcatttgaaaacatctaccctattctaaagggattcaggaagacgacgtaatggctctcatgtacccttgcctcccccacccccttctttttttttttttaaacaaatcagtttgttttggtacctttaaatggtggtgttgtgagaagatggatgttgagttgcagggtgtggcaccaggtgatgcccttctgtaagtgcccaccgcgggatgccgggaaggggcattatttgtgcactgagaacaccgcgcagcgtgactgtgagttgctcataccgtgctgctatctgggcagcgctgcccatttatttatatgtagattttaaacactgctgttgacaagttggtttgagggagaaaactttaagtgttaaagccacctctataattgattggactttttaattttaatgtttttccccatgaaccacagtttttatatttctaccagaaaagtaaaaatcttttttaaaagtgttgtttttctaatttataactcctaggggttatttctgtgccagacacattccacctctccagtattgcaggacagaatatatgtgttaatgaaaatgaatggctgtacatatttttttctttcttcagagtactctgtacaataaatgcagtttataaaagtgttagattgttgttaaaaaaaaaaaaaaaaaa

SEQ ID NO: 155 - DNA, 1435 bp, Homo sapiens
ggcggggcctgcttctcctcagcttcaggcggctgcgacgagccctcaggcgaacctctcggctttcccgcgcggcgccgcctcttgctgcgcctccgcctcctcctctgctccgccaccggcttcctcctcctgagcagtcagcccgcgcgccggccggctccgttatggcgacccgcagccctggcgtcgtgattagtgatgatgaaccaggttatgaccttgatttattttgcatacctaatcattatgctgaggatttggaaagggtgtttattcctcatggactaattatggacaggactgaacgtcttgctcgagatgtgatgaaggagatgggaggccatcacattgtagccctctgtgtgctcaaggggggctataaattctttgctgacctgctggattacatcaaagcactgaatagaaatagtgatagatccattcctatgactgtagattttatcagactgaagagctattgtaatgaccagtcaacaggggacataaaagtaattggtggagatgatctctcaactttaactggaaagaatgtcttgattgtggaagatataattgacactggcaaaacaatgcagactttgctttccttggtcaggcagtataatccaaagatggtcaaggtcgcaagcttgctggtgaaaaggaccccacgaagtgttggatataagccagactttgttggatttgaaattccagacaagtttgttgtaggatatgcccttgactataatgaatacttcagggatttgaatcatgtttgtgtcattagtgaaactggaaaagcaaaatacaaagcctaagatgagagttcaagttgagtttggaaacatctggagtcctattgacatcgccagtaaaattatcaatgttctagttctgtggccatctgcttagtagagctttttgcatgtatcttctaagaattttatctgttttgtactttagaaatgtcagttgctgcattcctaaactgtttatttgcactatgagcctatagactatcagttccctttgggcggattgttgtttaacttgtaaatgaaaaaattctcttaaaccacagcactattgagtgaaacattgaactcatatctgtaagaaataaagagaagatatattagttttttaattggtattttaatttttatatatgcaggaaagaatagaagtgattgaatattgttaattataccaccgtgtgttagaaaagtaagaagcagtcaattttcacatcaaagacagcatctaagaagttttgttctgtcctggaattattttagtagtgtttcagtaatgttgactgtattttccaacttgttcaaattattaccagtgaatctttgtcagcagttcccttttaaatgcaaatcaataaattcccaaaaatttaaaaaaaaaaaaaaaaaaaaaa

SEQ ID NO: 156 - DNA, 1852 bp, Homo sapiens
accgccgagaccgcgtccgccccgcgagcacagagcctcgcctttgccgatccgccgcccgtccacacccgccgccagctcaccatggatgatgatatcgccgcgctcgtcgtcgacaacggctccggcatgtgcaaggccggcttcgcgggcgacgatgccccccgggccgtcttcccctccatcgtggggcgccccaggcaccagggcgtgatggtgggcatgggtcagaaggattcctatgtgggcgacgaggcccagagcaagagaggcatcctcaccctgaagtaccccatcgagcacggcatcgtcaccaactgggacgacatggagaaaatctggcaccacaccttctacaatgagctgcgtgtggctcccgaggagcaccccgtgctgctgaccgaggcccccctgaaccccaaggccaaccgcgagaagatgacccagatcatgtttgagaccttcaacaccccagccatgtacgttgctatccaggctgtgctatccctgtacgcctctggccgtaccactggcatcgtgatggactccggtgacggggtcacccacactgtgcccatctacgaggggtatgccctcccccatgccatcctgcgtctggacctggctggccgggacctgactgactacctcatgaagatcctcaccgagcgcggctacagcttcaccaccacggccgagcgggaaatcgtgcgtgacattaaggagaagctgtgctacgtcgccctggacttcgagcaagagatggccacggctgcttccagctcctccctggagaagagctacgagctgcctgacggccaggtcatcaccattggcaatgagcggttccgctgccctgaggcactcttccagccttccttcctgggcatggagtcctgtggcatccacgaaactaccttcaactccatcatgaagtgtgacgtggacatccgcaaagacctgtacgccaacacagtgctgtctggcggcaccaccatgtaccctggcattgccgacaggatgcagaaggagatcactgccctggcacccagcacaatgaagatcaagatcattgctcctcctgagcgcaagtactccgtgtggatcggcggctccatcctggcctcgctgtccaccttccagcagatgtggatcagcaagcaggagtatgacgagtccggcccctccatcgtccaccgcaaatgcttctaggcggactatgacttagttgcgttacaccctttcttgacaaaacctaacttgcgcagaaaacaagatgagattggcatggctttatttgttttttttgttttgttttggttttttttttttttttggcttgactcaggatttaaaaactggaacggtgaaggtgacagcagtcggttggagcgagcatcccccaaagttcacaatgtggccgaggactttgattgcacattgttgtttttttaatagtcattccaaatatgagatgcgttgttacaggaagtcccttgccatcctaaaagccaccccacttctctctaaggagaatggcccagtcctctcccaagtccacacaggggaggtgatagcattgctttcgtgtaaattatgtaatgcaaaatttttttaatcttcgccttaatacttttttattttgttttattttgaatgatgagccttcgtgcccccccttcccccttttttgtcccccaacttgagatgtatgaaggcttttggtctccctgggagtgggtggaggcagccagggcttacctgtacactgacttgagaccagttgaataaaagtgcacaccttaaaaatgaaaaaaaaaaaaaaaaaaaaaaaaaaaaaaaaaaaaaaaaa

SEQ ID NO: 157 - DNA, 1229 bp, Homo sapiens
gtctgacgggcgatggcgcagccaatagacaggagcgctatccgcggtttctgattggctactttgttcgcattataaaaggcacgcgcgggcgcgaggcccttctctcgccaggcgtcctcgtggaagtgacatcgtctttaaaccctgcgtggcaatccctgacgcaccgccgtgatgcccagggaagacagggcgacctggaagtccaactacttccttaagatcatccaactattggatgattatccgaaatgtttcattgtgggagcagacaatgtgggctccaagcagatgcagcagatccgcatgtcccttcgcgggaaggctgtggtgctgatgggcaagaacaccatgatgcgcaaggccatccgagggcacctggaaaacaacccagctctggagaaactgctgcctcatatccgggggaatgtgggctttgtgttcaccaaggaggacctcactgagatcagggacatgttgctggccaataaggtgccagctgctgcccgtgctggtgccattgccccatgtgaagtcactgtgccagcccagaacactggtctcgggcccgagaagacctcctttttccaggctttaggtatcaccactaaaatctccaggggcaccattgaaatcctgagtgatgtgcagctgatcaagactggagacaaagtgggagccagcgaagccacgctgctgaacatgctcaacatctcccccttctcctttgggctggtcatccagcaggtgttcgacaatggcagcatctacaaccctgaagtgcttgatatcacagaggaaactctgcattctcgcttcctggagggtgtccgcaatgttgccagtgtctgtctgcagattggctacccaactgttgcatcagtaccccattctatcatcaacgggtacaaacgagtcctggccttgtctgtggagacggattacaccttcccacttgctgaaaaggtcaaggccttcttggctgatccatctgcctttgtggctgctgcccctgtggctgctgccaccacagctgctcctgctgctgctgcagccccagctaaggttgaagccaaggaagagtcggaggagtcggacgaggatatgggatttggtctctttgactaatcaccaaaaagcaaccaacttagccagttttatttgcaaaacaaggaaataaaggcttacttctttaaaaagtaaaaaaaaaaaaaaaaaaaaaaaaa

SEQ ID NO: 158 - DNA, 1229 bp, Homo sapiens; identical to SEQ ID NO: 157

SEQ ID NO: 159 - DNA, 6738 bp, Homo sapiens
gagagcgcggccgggacggttggagaagaaggcggctcccggaagggggagagacaaactgccgtaacctctgccgttcaggaacccggttacttatttattcgttaccctttttcttcttcctcccccaaaaaccttttccttttcccttctttttttttcctttttgggagctgaaaaatttccggtaagggaaagaagggctcctttcgctccttatttccccgcctccttccctcccccaccttcccctcctccggctttttcctcccaactcggggaggtccttcccggtggccgccctgacgaggtctgagcacctaggcggaggcggcgcaggctttttgtagtgaggtttgcgcctgcgcagcgcgcctgcctccgccatgcacgggggtggccccccctcgggggacagcgcatgcccgctgcgcaccatcaagagagtccagttcggagtcctgagtccggatgaactgaagcgaatgtctgtgacggagggtggcatcaaatacccagagacgactgagggaggccgccccaagcttggggggctgatggacccgaggcagggggtgattgagcggactggccgctgccaaacatgtgcaggaaacatgacagagtgtcctggccactttggccacattgaactggccaagcctgtgtttcacgtgggcttcctggtgaagacaatgaaagttttgcgctgtgtctgcttcttctgctccaaactgcttgtggactctaacaacccaaagatcaaggatatcctggctaagtccaagggacagcccaagaagcggctcacacatgtctacgacctttgcaagggcaaaaacatatgcgagggtggggaggagatggacaacaagttcggtgtggaacaacctgagggtgacgaggatctgaccaaagaaaagggccatggtggctgtgggcggtaccagcccaggatccggcgttctggcctagagctgtatgcggaatggaagcacgttaatgaggactctcaggagaagaagatcctgctgagtccagagcgagtgcatgagatcttcaaacgcatctcagatgaggagtgttttgtgctgggcatggagccccgctatgcacggccagagtggatgattgtcacagtgctgcctgtgcccccgctctccgtgcggcctgctgttgtgatgcagggctctgcccgtaaccaggatgacctgactcacaaactggctgacatcgtgaagatcaacaatcagctgcggcgcaatgagcagaacggcgcagcggcccatgtcattgcagaggatgtgaagctcctccagttccatgtggccaccatggtggacaatgagctgcctggcttgccccgtgccatgcagaagtctgggcgtcccctcaagtccctgaagcagcggttgaagggcaaggaaggccgggtgcgagggaacctgatgggcaaaagagtggacttctcggcccgtactgtcatcacccccgaccccaacctctccattgaccaggttggcgtgccccgctccattgctgccaacatgacctttgcggagattgtcacccccttcaacattgacagacttcaagaactagtgcgcagggggaacagccagtacccaggcgccaagtacatcatccgagacaatggtgatcgcattgacttgcgtttccaccccaagcccagtgaccttcacctgcagaccggctataaggtggaacggcacatgtgtgatggggacattgttatcttcaaccggcagccaactctgcacaaaatgtccatgatggggcatcgggtccgcattctcccatggtctacctttcgcttgaatcttagtgtgacaactccgtacaatgcagactttgacggggatgagatgaacttgcacctgccacagtctctggagacgcgagcagagatccaggagctggccatggttcctcgcatgattgtcaccccccagagcaatcggcctgtcatgggtattgtgcaggacacactcacagcagtgcgcaaattcaccaagagagacgtcttcctggagcggggtgaagtgatgaacctcctgatgttcctgtcgacgtgggatgggaaggtcccacagccggccatcctaaagccccggcccctgtggacaggcaagcaaatcttctccctcatcatacctggtcacatcaattgtatccgtacccacagcacccatcccgatgatgaagacagtggcccttacaagcacatctctcctggggacaccaaggtggtggtggagaatggggagctgatcatgggcatcctgtgtaagaagtctctgggcacgtcagctggctccctggtccacatctcctacctagagatgggtcatgacatcactcgcctcttctactccaacattcagactgtcattaacaactggctcctcatcgagggtcatactattggcattggggactccattgctgattctaagacttaccaggacattcagaacactattaagaaggccaagcaggacgtaatagaggtcatcgagaaggcacacaacaatgagctggagcccaccccagggaacactctgcggcagacgtttgagaatcaggtgaaccgcattcttaacgatgcccgagacaagactggctcctctgctcagaaatccctgtctgaatacaacaacttcaagtctatggtcgtgtccggagctaaaggttccaagattaacatctcccaggtcattgctgtcgttggacagcagaacgtcgagggcaagcggattccatttggcttcaagcaccggactctgcctcacttcatcaaggatgactacgggcctgagagccgtggctttgtggagaactcctacctagccggcctcacacccactgagttctttttccacgccatggggggtcgtgaggggctcattgacacggctgtcaagactgctgagactggatacatccagcggcggctgatcaagtccatggagtcagtgatggtgaagtacgacgcgactgtgcggaactccatcaaccaggtggtgcagctgcgctacggcgaagacggcctggcaggcgagagcgttgagttccagaacctggctacgcttaagccttccaacaaggcttttgagaagaagttccgctttgattataccaatgagagggccctgcggcgcactctgcaggaggacctggtgaaggacgtgctgagcaacgcacacatccagaacgagttggagcgggaatttgagcggatgcgggaggatcgggaggtgctcagggtcatcttcccaactggagacagcaaggtcgtcctcccctgtaacctgctgcggatgatctggaatgctcagaaaatcttccacatcaacccacgccttccctccgacctgcaccccatcaaagtggtggagggagtcaaggaattgagcaagaagctggtgattgtgaatggggatgacccactaagtcgacaggcccaggaaaatgccacgctgctcttcaacatccacctgcggtccacgttgtgttcccgccgcatggcagaggagtttcggctcagtggggaggccttcgactggctgcttggggagattgagtccaagttcaaccaagccattgcgcatcccggggaaatggtgggggctctggctgcgcagtcccttggagaacctgccacccagatgaccttgaataccttccactatgctggtgtgtctgccaagaatgtgacgctgggtgtgccccgacttaaggagctcatcaacatttccaagaagccaaagactccttcgcttactgtcttcctgttgggccagtccgctcgagatgctgagagagccaaggatattctgtgccgtctggagcatacaacgttgaggaaggtgactgccaacacagccatctactatgaccccaacccccagagcacggtggtggcagaggatcaggaatgggtgaatgtctactatgaaatgcctgactttgatgtggcccgaatctccccctggctgttgcgggtggagctggatcggaagcacatgactgaccggaagctcaccatggagcagattgctgaaaagatcaatgctggttttggtgacgacttgaactgcatctttaatgatgacaatgcagagaagctggtgctccgtattcgcatcatgaacagcgatgagaacaagatgcaagaggaggaagaggtggtggacaagatggatgatgatgtcttcctgcgctgcatcgagtccaacatgctgacagatatgaccctgcagggcatcgagcagatcagcaaggtgtacatgcacttgccacagacagacaacaagaagaagatcatcatcacggaggatggggaattcaaggccctgcaggagtggatcctggagacggacggcgtgagcttgatgcgggtgctgagtgagaaggacgtggaccccgtacgcaccacgtccaatgacattgtggagatcttcacggtgctgggcattgaagccgtgcggaaggccctggagcgggagctgtaccacgtcatctcctttgatggctcctatgtcaattaccgacacttggctctcttgtgtgataccatgacctgtcgtggccacttgatggccatcacccgacacggagtcaaccgccaggacacaggaccactcatgaagtgttcctttgaggaaacggtggacgtgcttatggaagcagccgcacacggtgagagtgaccccatgaagggggtctctgagaatatcatgctgggccagctggctccggccggcactggctgctttgacctcctgcttgatgcagagaagtgcaagtatggcatggagatccccaccaatatccccggcctgggggctgctggacccaccggcatgttctttggttcagcacccagtcccatgggtggaatctctcctgccatgacaccttggaaccagggtgcaacccctgcctatggcgcctggtcccccagtgttgggagtggaatgaccccaggggcagccggcttctctcccagtgctgcgtcagatgccagcggcttcagcccaggttactcccctgcctggtctcccacaccgggctccccggggtccccaggtccctcaagcccctacatcccttcaccaggtggtgccatgtctcccagctactcgccaacgtcacctgcctacgagccccgctctcctgggggctacacaccccagagtccctcttattcccccacttcaccctcctactcccctacctctccatcctattctccaaccagtcccaactatagtcccacatcacccagctattcgccaacgtcacccagctactcaccgacctctcccagctactcacccacctctcccagctactcgcccacctctcccagctactcgcccacctctcccagctactcacccacttcccctagctactcgcccacttcccctagctactcgccaacgtctcccagctactcgccgacatctcccagctactcgccaacttcacccagctattctcccacttctcccagctactcacctacctctccaagctattcacccacctcccccagctactcacccacttccccaagttactcacccaccagcccgaactattctccaaccagtcccaattacaccccaacatcacccagctacagcccgacatcacccagctattcacctactagtcccaactacacacctaccagccctaactacagcccaacctctccaagctactctccaacatcacccagctattccccgacctcaccaagttactccccttccagcccacgatacacaccacagtctccaacctataccccaagctcacccagctacagccccagctcgcccagctacagcccaacctcacccaagtacaccccaaccagtccttcttacagtcccagctccccagagtataccccaacctctcccaagtactcacctaccagtcccaaatattcacccacctctcccaagtactcgcctaccagtcccacctattcacccaccaccccaaaatactccccaacatctcctacttattccccaacctctccagtctacaccccaacctctcccaagtactcacctactagccccacttactcgcccacttcccccaagtactcgcccaccagccccacctactcgcccacctcccccaaaggctcaacctactctcccacttcccctggttactcgcccaccagccccacctacagtctcacaagcccggctatcagcccggatgacagtgacgaggagaactgagggcacgtggggtgcggcagcgggctagggcccagggcagcttgcccgtgctgctgtgcagttcttgcctccctcacggggcgtcacccccagcccagctccgttgtacataaatgccttgtggcagagctcccggtgaacttctggatcccgtttctgatgcagactcttgtcttgttctccacttgtgctgttagaactcactggcccagtggtgttctcactcctaccccacccaccccctgcctgtccccaaattgaagatccttccttgcctgtggcttgatgcggggcgggtaaagggtattttaacttaggggtagttcctgctgtgagtggttacagctgatcctcgggaagaacaaagctaaagctgccttttgtctgttattttatttttttgaagtttaaataaagtttactaattttgaccaaaagt

SEQ ID NO: 160 - DNA, 987 bp, Homo sapiens
aatataagtggaggcgtcgcgctggcgggcattcctgaagctgacagcattcgggccgagatgtctcgctccgtggccttagctgtgctcgcgctactctctctttctggcctggaggctatccagcgtactccaaagattcaggtttactcacgtcatccagcagagaatggaaagtcaaatttcctgaattgctatgtgtctgggtttcatccatccgacattgaagttgacttactgaagaatggagagagaattgaaaaagtggagcattcagacttgtctttcagcaaggactggtctttctatctcttgtactacactgaattcacccccactgaaaaagatgagtatgcctgccgtgtgaaccatgtgactttgtcacagcccaagatagttaagtgggatcgagacatgtaagcagcatcatggaggtttgaagatgccgcatttggattggatgaattccaaattctgcttgcttgctttttaatattgatatgcttatacacttacactttatgcacaaaatgtagggttataataatgttaacatggacatgatcttctttataattctactttgagtgctgtctccatgtttgatgtatctgagcaggttgctccacaggtagctctaggagggctggcaacttagaggtggggagcagagaattctcttatccaacatcaacatcttggtcagatttgaactcttcaatctcttgcactcaaagcttgttaagatagttaagcgtgcataagttaacttccaatttacatactctgcttagaatttgggggaaaatttagaaatataattgacaggattattggaaatttgttataatgaatgaaacattttgtcatataagattcatatttacttcttatacatttgataaagtaaggcatggttgtggttaatctggtttatttttgttccacaagttaaataaatcataaaacttgatgtgttatctctta

SEQ ID NO: 161 - DNA, 5416 bp, Homo sapiens
agtgggccgccatgttgtcggagtgaaaggtaagggggagcgagagcgccagagagagaagatcggggggctgaaatccatcttcatcctaccgctccgcccgtgttggtggaatgagcgttgcatgtgtcttgaagagaaaagcagtgctttggcaggactctttcagcccccacctgaaacatcaccctcaagaaccagctaatcccaacatgcctgttgttttgacatctggaacagggtcgcaagcgcagccacaaccagctgcaaatcaggctcttgcagctgggactcactccagccctgtcccaggatctataggagttgcaggccgttcccaggacgacgctatggtggactacttctttcagaggcagcatggtgagcagcttgggggaggaggaagtggaggaggcggctataataatagcaaacatcgatggcctactggggataacattcatgcagaacatcaggtgcgttccatggatgaactgaatcatgattttcaagcacttgctctggagggaagagcgatgggagagcagctcttgccaggtaaaaagttttgggaaacagatgaatccagcaaagatggaccaaaaggaatattcctgggtgatcaatggcgagacagtgcctggggaacatcagatcattcagtttcccagccaatcatggtgcagagaagacctggtcagagtttccatgtgaacagtgaggtcaattctgtactgtccccacgatcggagagtgggggactaggcgttagcatggtggagtatgtgttgagctcatccccgggcgattcctgtctaagaaaaggaggatttggcccaagggatgcagacagtgatgaaaacgacaaaggtgaaaagaagaacaagggtacgtttgatggagataagctaggagatttgaaggaggagggtgatgtgatggacaagaccaatggtttaccagtgcagaatgggattgatgcagacgtcaaagattttagccgtacccctggtaattgccagaactctgctaatgaagtggatcttctgggtccaaaccagaatggttctgagggcttagcccagctgaccagcaccaatggtgccaagcctgtggaggatttctccaacatggagtcccagagtgtccccttggaccccatggaacatgtgggcatggagcctcttcagtttgattattcaggcacgcaggtacctgtggactcagcagcagcaactgtgggactttttgactacaattctcaacaacagctgttccaaagacctaatgcgcttgctgtccagcagttgacagctgctcagcagcagcagtatgcactggcagctgctcatcagccgcacatcggtttagctcccgctgcgtttgtccccaatccatacatcatcagcgctgctcccccagggacggacccctacacagctggattggctgcagcagcgacactaggcccagctgtggtccctcaccagtattatggagttactccctggggagtctaccctgccagtcttttccagcagcaagctgccgctgccgctgcagcaactaattcagctaatcaacagaccaccccacaggctcagcaaggacagcagcaggttctccgtggaggagccagccaacgtcctttgaccccaaaccagaaccagcagggacagcaaacggatccccttgtggcagctgcagcagtgaattctgcccttgcatttggacaaggtctggcagcaggcatgccaggttatccggtgttggctcctgctgcttactatgaccaaactggtgcccttgtagtgaatgcaggcgcgagaaatggtcttggagctcctgttcgacttgtagctcctgccccagtcatcattagttcctcagctgcacaagcagctgttgcagcagccgcagcttcagcaaatggagcagctggtggtcttgctggaacaacaaatggaccatttcgccctttaggaacacagcagcctcagccccagccccagcagcagcccaataacaacctggcatccagttctttctacggcaacaactctctgaacagcaattcacagagcagctccctcttctcccagggctctgcccagcctgccaacacatccttgggattcggaagtagcagttctctcggcgccaccctgggatccgcccttggagggtttggaacagcagttgcaaactccaacactggcagtggctcccgccgtgactccctgactggcagcagtgacctttataagaggacatcgagcagcttgacccccattggacacagtttttataacggccttagcttttcctcctctcctggacccgtgggcatgcctctccctagtcagggaccaggacattcacagacaccacctccttccctctcttcacatggatcctcttcaagcttaaacctgggaggactcacgaatggcagtggaagatacatctctgctgctccaggcgctgaagccaagtaccgcagtgcaagcagcgcctccagcctcttcagcccgagcagcactcttttctcttcctctcgtttgcgatatggaatgtctgatgtcatgccttctggcaggagcaggcttttggaagattttcgaaacaaccggtaccccaatttacaactgcgggagattgctggacatataatggaattttcccaagaccagcatgggtccagattcattcagctgaaactggagcgtgccacaccagctgagcgccagcttgtcttcaatgaaatcctccaggctgcctaccaactcatggtggatgtgtttggtaattacgtcattcagaagttctttgaatttggcagtcttgaacagaagctggctttggcagaacggattcgaggccacgtcctgtcattggcactacagatgtatggctgccgtgttatccagaaagctcttgagtttattccttcagaccagcaggtaattaatgagatggttcgggaactagatggccatgtcttgaagtgtgtgaaagatcagaatggcaatcacgtggttcagaaatgcattgaatgtgtacagccccagtctttgcaatttatcatcgatgcgtttaagggacaggtatttgccttatccacacatccttatggctgccgagtgattcagagaatcctggagcactgtctccctgaccagacactccctattttagaggagcttcaccagcacacagagcagcttgtacaggatcaatatggaaattatgtaatccaacatgtactggagcacggtcgtcctgaggataaaagcaaaattgtagcagaaatccgaggcaatgtacttgtattgagtcagcacaaatttgcaagcaatgttgtggagaagtgtgttactcacgcctcacgtacggagcgcgctgtgctcatcgatgaggtgtgcaccatgaacgacggtccccacagtgccttatacaccatgatgaaggaccagtatgccaactacgtggtccagaagatgattgacgtggcggagccaggccagcggaagatcgtcatgcataagatccggccccacatcgcaactcttcgtaagtacacctatggcaagcacattctggccaagctggagaagtactacatgaagaacggtgttgacttagggcccatctgtggcccccctaatggtatcatctgaggcagtgtcacccgctgttccctcattcccgctgacctcactggcccactggcaaatccaaccagcaaccagaaatgttctagtgtagagtctgagacgggcaagtggttgctccaggattactccctcctccaaaaaaggaatcaaatccacgagtggaaaagcctttgtaaatttaattttattacacataacatgtactattttttttaattgactaattgccctgctgttttactggtgtataggatacttgtacataggtaaccaatgtacatgggaggccacatattttgttcactgttgtatctatatttcacatgtggaaactttcagggtggttggtttaacaaaaaaaaaaagctttaaaaaaaaaagaaaaaaaggaaaaggtttttagctcatttgcctggccggcaagttttgcaaatagctcttccccacctcctcattttagtaaaaaacaaacaaaaacaaaaaaacctgagaagtttgaattgtagttaaatgaccccaaactggcatttaacactgtttataaaaaatatatatatatatatatatatatataatgaaaaaggtttcagagttgctaaagcttcagtttgtgacattaagtttatgaaattctaaaaaatgccttttttggagactatattatgctgaagaaggctgttcgtgaggaggagatgcgagcacccagaacgtcttttgaggctgggcgggtgtgattgtttactgcctactggatttttttctattaacattgaaaggtaaaatctgattatttagcatgagaaaaaaaaatccaactctgcttttggtcttgcttctataaatatatagtgtatacttggtgtagactttgcatatatacaaatttgtagtattttcttgttttgatgtctaatctgtatctataatgtaccctagtagtcgaacatacttttgattgtacaattgtacatttgtatacctgtaatgtaaatgtggagaagtttgaatcaacataaacacgttttttggtaagaaaagagaattagccagccctgtgcattcagtgtatattctcaccttttatggtcgtagcatatagtgttgtatattgtaaattgtaatttcaaccagaagtaaatttttttcttttgaaggaataaatgttctttatacagcctagttaatgtttaaaaagaaaaaaatagcttggttttatttgtcatctagtctcaagtatagcgagattctttctaaatgttattcaagattgagttctcactagtgtttttttaatcctaaaaaagtaatgttttgattttgtgacagtcaaaaggacgtgcaaaagtctagccttgcccgagctttccttacaatcagagcccctctcaccttgtaaagtgtgaatcgcccttcccttttgtacagaagatgaactgtattttgcattttgtctacttgtaagtgaatgtaacatactgtcaattttccttgtttgaatatagaattgtaacactacacggtgtacatttccagagccttgtgtatatttccaatgaacttttttgcaagcacacttgtaaccatatgtgtataattaacaaacctgtgtatgcttatgcctgggcaactattttttgtaactcttgtgtagattgtctctaaacaatgtgtgatctttattttgaaaaatacagaactttggaatctgaaaaaaaaaaaaaaaaaaaaaaaaaaaaaaa

SEQ ID NO: 162 - DNA, 5410 bp, Homo sapiens
agtgggccgccatgttgtcggagtgaaaggtaagggggagcgagagcgccagagagagaagatcggggggctgaaatccatcttcatcctaccgctccgcccgtgttggtggaatgagcgttgcatgtgtcttgaagagaaaagcagtgctttggcaggactctttcagcccccacctgaaacatcaccctcaagaaccagctaatcccaacatgcctgttgttttgacatctggaacagggtcgcaagcgcagccacaaccagctgcaaatcaggctcttgcagctgggactcactccagccctgtcccaggatctataggagttgcaggccgttcccaggacgacgctatggtggactacttctttcagaggcagcatggtgagcagcttgggggaggaggaagtggaggaggcggctataataatagcaaacatcgatggcctactggggataacattcatgcagaacatcaggtgcgttccatggatgaactgaatcatgattttcaagcacttgctctggagggaagagcgatgggagagcagctcttgccaggtaaaaagttttgggaaacagatgaatccagcaaagatggaccaaaaggaatattcctgggtgatcaatggcgagacagtgcctggggaacatcagatcattcagtttcccagccaatcatggtgcagagaagacctggtcagagtttccatgtgaacagtgaggtcaattctgtactgtccccacgatcggagagtgggggactaggcgttagcatggtggagtatgtgttgagctcatccccgggcgattcctgtctaagaaaaggaggatttggcccaagggatgcagacagtgatgaaaacgacaaaggtgaaaagaagaacaagggtacgtttgatggagataagctaggagatttgaaggaggagggtgatgtgatggacaagaccaatggtttaccagtgcagaatgggattgatgcagacgtcaaagattttagccgtacccctggtaattgccagaactctgctaatgaagtggatcttctgggtccaaaccagaatggttctgagggcttagcccagctgaccagcaccaatggtgccaagcctgtggaggatttctccaacatggagtcccagagtgtccccttggaccccatggaacatgtgggcatggagcctcttcagtttgattattcaggcacgcaggtacctgtggactcagcagcagcaactgtgggactttttgactacaattctcaacaacagctgttccaaagacctaatgcgcttgctgtccagcagttgacagctgctcagcagcagcagtatgcactggcagctgctcatcagccgcacatcggtttagctcccgctgcgtttgtccccaatccatacatcatcagcgctgctcccccagggacggacccctacacagctggattggctgcagcagcgacactaggcccagctgtggtccctcaccagtattatggagttactccctggggagtctaccctgccagtcttttccagcagcaagctgccgctgccgctgcagcaactaattcagctaatcaacagaccaccccacaggctcagcaaggacagcagcaggttctccgtggaggagccagccaacgtcctttgaccccaaaccagaaccagcagggacagcaaacggatccccttgtggcagctgcagcagtgaattctgcccttgcatttggacaaggtctggcagcaggcatgccaggttatccggtgttggctcctgctgcttactatgaccaaactggtgcccttgtagtgaatgcaggcgcgagaaatggtcttggagctcctgttcgacttgtagctcctgccccagtcatcattagttcctcagctgcacaagcagctgttgcagcagccgcagcttcagcaaatggagcagctggtggtcttgctggaacaacaaatggaccatttcgccctttaggaacacagcagcctcagccccagccccagcagcagcccaataacaacctggcatccagttctttctacggcaacaactctctgaacagcaattcacagagcagctccctcttctcccagggctctgcccagcctgccaacacatccttgggattcggaagtagcagttctctcggcgccaccctgggatccgcccttggagggtttggaacagcagttgcaaactccaacactggcagtggctcccgccgtgactccctgactggcagcagtgacctttataagaggacatcgagcagcttgacccccattggacacagtttttataacggccttagcttttcctcctctcctggacccgtgggcatgcctctccctagtcagggaccaggacattcacagacaccacctccttccctctcttcacatggatcctcttcaagcttaaacctgggaggactcacgaatggcagtggaagatacatctctgctgctccaggcgctgaagccaagtaccgcagtgcaagcagcgcctccagcctcttcagcccgagcagcactcttttctcttcctctcgtttgcgatatggaatgtctgatgtcatgccttctggcaggagcaggcttttggaagattttcgaaacaaccggtaccccaatttacaactgcgggagattgctggacatataatggaattttcccaagaccagcatgggtccagattcattcagctgaaactggagcgtgccacaccagctgagcgccagcttgtcttcaatgaaatcctccaggctgcctaccaactcatggtggatgtgtttggtaattacgtcattcagaagttctttgaatttggcagtcttgaacagaagctggctttggcagaacggattcgaggccacgtcctgtcattggcactacagatgtatggctgccgtgttatccagaaagctcttgagtttattccttcagaccagcagaatgagatggttcgggaactagatggccatgtcttgaagtgtgtgaaagatcagaatggcaatcacgtggttcagaaatgcattgaatgtgtacagccccagtctttgcaatttatcatcgatgcgtttaagggacaggtatttgccttatccacacatccttatggctgccgagtgattcagagaatcctggagcactgtctccctgaccagacactccctattttagaggagcttcaccagcacacagagcagcttgtacaggatcaatatggaaattatgtaatccaacatgtactggagcacggtcgtcctgaggataaaagcaaaattgtagcagaaatccgaggcaatgtacttgtattgagtcagcacaaatttgcaagcaatgttgtggagaagtgtgttactcacgcctcacgtacggagcgcgctgtgctcatcgatgaggtgtgcaccatgaacgacggtccccacagtgccttatacaccatgatgaaggaccagtatgccaactacgtggtccagaagatgattgacgtggcggagccaggccagcggaagatcgtcatgcataagatccggccccacatcgcaactcttcgtaagtacacctatggcaagcacattctggccaagctggagaagtactacatgaagaacggtgttgacttagggcccatctgtggcccccctaatggtatcatctgaggcagtgtcacccgctgttccctcattcccgctgacctcactggcccactggcaaatccaaccagcaaccagaaatgttctagtgtagagtctgagacgggcaagtggttgctccaggattactccctcctccaaaaaaggaatcaaatccacgagtggaaaagcctttgtaaatttaattttattacacataacatgtactattttttttaattgactaattgccctgctgttttactggtgtataggatacttgtacataggtaaccaatgtacatgggaggccacatattttgttcactgttgtatctatatttcacatgtggaaactttcagggtggttggtttaacaaaaaaaaaaagctttaaaaaaaaaagaaaaaaaggaaaaggtttttagctcatttgcctggccggcaagttttgcaaatagctcttccccacctcctcattttagtaaaaaacaaacaaaaacaaaaaaacctgagaagtttgaattgtagttaaatgaccccaaactggcatttaacactgtttataaaaaatatatatatatatatatatatatataatgaaaaaggtttcagagttgctaaagcttcagtttgtgacattaagtttatgaaattctaaaaaatgccttttttggagactatattatgctgaagaaggctgttcgtgaggaggagatgcgagcacccagaacgtcttttgaggctgggcgggtgtgattgtttactgcctactggatttttttctattaacattgaaaggtaaaatctgattatttagcatgagaaaaaaaaatccaactctgcttttggtcttgcttctataaatatatagtgtatacttggtgtagactttgcatatatacaaatttgtagtattttcttgttttgatgtctaatctgtatctataatgtaccctagtagtcgaacatacttttgattgtacaattgtacatttgtatacctgtaatgtaaatgtggagaagtttgaatcaacataaacacgttttttggtaagaaaagagaattagccagccctgtgcattcagtgtatattctcaccttttatggtcgtagcatatagtgttgtatattgtaaattgtaatttcaaccagaagtaaatttttttcttttgaaggaataaatgttctttatacagcctagttaatgtttaaaaagaaaaaaatagcttggttttatttgtcatctagtctcaagtatagcgagattctttctaaatgttattcaagattgagttctcactagtgtttttttaatcctaaaaaagtaatgttttgattttgtgacagtcaaaaggacgtgcaaaagtctagccttgcccgagctttccttacaatcagagcccctctcaccttgtaaagtgtgaatcgcccttcccttttgtacagaagatgaactgtattttgcattttgtctacttgtaagtgaatgtaacatactgtcaattttccttgtttgaatatagaattgtaacactacacggtgtacatttccagagccttgtgtatatttccaatgaacttttttgcaagcacacttgtaaccatatgtgtataattaacaaacctgtgtatgcttatgcctgggcaactattttttgtaactcttgtgtagattgtctctaaacaatgtgtgatctttattttgaaaaatacagaactttggaatctgaaaaaaaaaaaaaaaaaaaaaaaaaaaaaaa

SEQ ID NO: 163 - DNA, 1771 bp, Homo sapiens
ggcggccaggccgggcgcggagtgggcgcgcggggccggaggaggggccagcgaccgcggcaccgcctgtgcccgcccgcccctccgcagccgctacttaagaggctccagcgccggccccgccctagtgcgttacttacctcgactcttagcttgtcggggacggtaaccgggacccggtgtctgctcctgtcgccttcgcctcctaatccctagccactatgcgtgagtgcatctccatccacgttggccaggctggtgtccagattggcaatgcctgctgggagctctactgcctggaacacggcatccagcccgatggccagatgccaagtgacaagaccattgggggaggagatgactccttcaacaccttcttcagtgagacgggcgctggcaagcacgtgccccgggctgtgtttgtagacttggaacccacagtcattgatgaagttcgcactggcacctaccgccagctcttccaccctgagcagctcatcacaggcaaggaagatgctgccaataactatgcccgagggcactacaccattggcaaggagatcattgaccttgtgttggaccgaattcgcaagctggctgaccagtgcaccggtcttcagggcttcttggttttccacagctttggtgggggaactggttctgggttcacctccctgctcatggaacgtctctcagttgattatggcaagaagtccaagctggagttctccatttacccagcaccccaggtttccacagctgtagttgagccctacaactccatcctcaccacccacaccaccctggagcactctgattgtgccttcatggtagacaatgaggccatctatgacatctgtcgtagaaacctcgatatcgagcgcccaacctacactaaccttaaccgccttattagccagattgtgtcctccatcactgcttccctgagatttgatggagccctgaatgttgacctgacagaattccagaccaacctggtgccctacccccgcatccacttccctctggccacatatgcccctgtcatctctgctgagaaagcctaccatgaacagctttctgtagcagagatcaccaatgcttgctttgagccagccaaccagatggtgaaatgtgaccctcgccatggtaaatacatggcttgctgcctgttgtaccgtggtgacgtggttcccaaagatgtcaatgctgccattgccaccatcaaaaccaagcgcagcatccagtttgtggattggtgccccactggcttcaaggttggcatcaactaccagcctcccactgtggtgcctggtggagacctggccaaggtacagagagctgtgtgcatgctgagcaacaccacagccattgctgaggcctgggctcgcctggaccacaagtttgacctgatgtatgccaagcgtgcctttgttcactggtacgtgggtgaggggatggaggaaggcgagttttcagaggcccgtgaagatatggctgcccttgagaaggattatgaggaggttggtgtggattctgttgaaggagagggtgaggaagaaggagaggaatactaattatccattccttttggccctgcagcatgtcatgctcccagaatttcagcttcagcttaactgacagacgttaaagctttctggttagattgttttcacttggtgatcatgtcttttccatgtgtacctgtaatatttttccatcatatctcaaagtaaagtcattaacatcaaaaaaaaaaaaaaaaaaaaaa

SEQ ID NO: 164 - DNA, 2458 bp, Homo sapiens
cagaagaaggcagcgcccaaggcgcatgcgcagcggtcactcccgctgtatattaaggcgccggcgatcgcggcctgaggctgctcccggacaagggcaacgagcgtttcgtttggacttctcgacttgagtgcccgcctccttcgccgccgcctctgcagtcctcagcgcagttatgcccagttcttcccgctgtggggacacgaccacggaggaatccttgcttcagggactcgggaccctgctggaccccttcctcgggtttaggggatgtggggaccaggagaaagtcaggatccctaagagtcttccctgcctggatggatgagtggcttcttctccacctagattctttccacaggagccagcatacttcctgaacatggagagtgttgttcgccgctgcccattcttatcccgagtcccccaggcctttctgcagaaagcaggcaaatctctgttgttctatgcccaaaactgccccaagatgatggaagttggggccaagccagcccctcgggcattgtccactgcagcagtacactaccaacagatcaaagaaacccctccggccagtgagaaagacaaaactgctaaggccaaggtccaacagactcctgatggatcccagcagagtccagatggcacacagcttccgtctggacaccccttgcctgccacaagccagggcactgcaagcaaatgccctttcctggcagcacagatgaatcagagaggcagcagtgtcttctgcaaagccagtcttgagcttcaggaggatgtgcaggaaatgaatgccgtgaggaaagaggttgctgaaacctcagcaggccccagtgtggttagtgtgaaaaccgatggaggggatcccagtggactgctgaagaacttccaggacatcatgcaaaagcaaagaccagaaagagtgtctcatcttcttcaagataacttgccaaaatctgtttccacttttcagtatgatcgtttctttgagaaaaaaattgatgagaaaaagaatgaccacacctatcgagtttttaaaactgtgaaccggcgagcacacatcttccccatggcagatgactattcagactccctcatcaccaaaaagcaagtgtcagtctggtgcagtaatgactacctaggaatgagtcgccacccacgggtgtgtggggcagttatggacactttgaaacaacatggtgctggggcaggtggtactagaaatatttctggaactagtaaattccatgtggacttagagcgggagctggcagacctccatgggaaagatgccgcactcttgttttcctcgtgctttgtggccaatgactcaaccctcttcaccctggctaagatgatgccaggctgtgagatttactctgattctgggaaccatgcctccatgatccaagggattcgaaacagccgagtgccaaagtacatcttccgccacaatgatgtcagccacctcagagaactgctgcaaagatctgacccctcagtccccaagattgtggcatttgaaactgtccattcaatggatggggcggtgtgcccactggaagagctgtgtgatgtggcccatgagtttggagcaatcaccttcgtggatgaggtccacgcagtggggctttatggggctcgaggcggagggattggggatcgggatggagtcatgccaaaaatggacatcatttctggaacacttggcaaagcctttggttgtgttggagggtacatcgccagcacgagttctctgattgacaccgtacggtcctatgctgctggcttcatcttcaccacctctctgccacccatgctgctggctggagccctggagtctgtgcggatcctgaagagcgctgagggacgggtgcttcgccgccagcaccagcgcaacgtcaaactcatgagacagatgctaatggatgccggcctccctgttgtccactgccccagccacatcatccctgtgcgggttgcagatgctgctaaaaacacagaagtctgtgatgaactaatgagcagacataacatctacgtgcaagcaatcaattaccctacggtgccccggggagaagagctcctacggattgcccccacccctcaccacacaccccagatgatgaactacttccttgagaatctgctagtcacatggaagcaagtggggctggaactgaagcctcattcctcagctgagtgcaacttctgcaggaggccactgcattttgaagtgatgagtgaaagagagaagtcctatttctcaggcttgagcaagttggtatctgctcaggcctgagcatgacctcaattatttcacttaaccccaggccattatcatatccagatggtcttcagagttgtctttatatgtgaattaagttatattaaattttaatctatagtaaaaacatagtcctggaaataaattcttgcttaaatggtgaaaaaa

SEQ ID NO: 165 - DNA, 2281 bp, Homo sapiens
cagaagaaggcagcgcccaaggcgcatgcgcagcggtcactcccgctgtatattaaggcgccggcgatcgcggcctgaggctgctcccggacaagggcaacgagcgtttcgtttggacttctcgacttgagtgcccgcctccttcgccgccgcctctgcagtcctcagcgcagtctttccacaggagccagcatacttcctgaacatggagagtgttgttcgccgctgcccattcttatcccgagtcccccaggcctttctgcagaaagcaggcaaatctctgttgttctatgcccaaaactgccccaagatgatggaagttggggccaagccagcccctcgggcattgtccactgcagcagtacactaccaacagatcaaagaaacccctccggccagtgagaaagacaaaactgctaaggccaaggtccaacagactcctgatggatcccagcagagtccagatggcacacagcttccgtctggacaccccttgcctgccacaagccagggcactgcaagcaaatgccctttcctggcagcacagatgaatcagagaggcagcagtgtcttctgcaaagccagtcttgagcttcaggaggatgtgcaggaaatgaatgccgtgaggaaagaggttgctgaaacctcagcaggccccagtgtggttagtgtgaaaaccgatggaggggatcccagtggactgctgaagaacttccaggacatcatgcaaaagcaaagaccagaaagagtgtctcatcttcttcaagataacttgccaaaatctgtttccacttttcagtatgatcgtttctttgagaaaaaaattgatgagaaaaagaatgaccacacctatcgagtttttaaaactgtgaaccggcgagcacacatcttccccatggcagatgactattcagactccctcatcaccaaaaagcaagtgtcagtctggtgcagtaatgactacctaggaatgagtcgccacccacgggtgtgtggggcagttatggacactttgaaacaacatggtgctggggcaggtggtactagaaatatttctggaactagtaaattccatgtggacttagagcgggagctggcagacctccatgggaaagatgccgcactcttgttttcctcgtgctttgtggccaatgactcaaccctcttcaccctggctaagatgatgccaggctgtgagatttactctgattctgggaaccatgcctccatgatccaagggattcgaaacagccgagtgccaaagtacatcttccgccacaatgatgtcagccacctcagagaactgctgcaaagatctgacccctcagtccccaagattgtggcatttgaaactgtccattcaatggatggggcggtgtgcccactggaagagctgtgtgatgtggcccatgagtttggagcaatcaccttcgtggatgaggtccacgcagtggggctttatggggctcgaggcggagggattggggatcgggatggagtcatgccaaaaatggacatcatttctggaacacttggcaaagcctttggttgtgttggagggtacatcgccagcacgagttctctgattgacaccgtacggtcctatgctgctggcttcatcttcaccacctctctgccacccatgctgctggctggagccctggagtctgtgcggatcctgaagagcgctgagggacgggtgcttcgccgccagcaccagcgcaacgtcaaactcatgagacagatgctaatggatgccggcctccctgttgtccactgccccagccacatcatccctgtgcgggttgcagatgctgctaaaaacacagaagtctgtgatgaactaatgagcagacataacatctacgtgcaagcaatcaattaccctacggtgccccggggagaagagctcctacggattgcccccacccctcaccacacaccccagatgatgaactacttccttgagaatctgctagtcacatggaagcaagtggggctggaactgaagcctcattcctcagctgagtgcaacttctgcaggaggccactgcattttgaagtgatgagtgaaagagagaagtcctatttctcaggcttgagcaagttggtatctgctcaggcctgagcatgacctcaattatttcacttaaccccaggccattatcatatccagatggtcttcagagttgtctttatatgtgaattaagttatattaaattttaatctatagtaaaaacatagtcctggaaataaattcttgcttaaatggtgaaaaaa

SEQ ID NO: 166 - protein, 339 aa, Homo sapiens
MDQNNSLPPYAQGLASPQGAMTPGIPIFSPMMPYGTGLTPQPIQNTNSLSILEEQQRQQQQQQQQQQQQQQQQQQQQQQQQQQQQQQQQQQQQQQAVAAAAVQQSTSQQATQGTSGQAPQLFHSQTLTTAPLPGTTPLYPSPMTPMTPITPATPASESSGIVPQLQNIVSTVNLGCKLDLKTIALRARNAEYNPKRFAAVIMRIREPRTTALIFSSGKMVCTGAKSEEQSRLAARKYARVVQKLGFPAKFLDFKIQNMVGSCDVKFPIRLEGLVLTHQQFSSYEPELFPGLIYRMIKPRIVLLIFVSGKVVLTGAKVRAEIYEAFENIYPILKGFRKTT

SEQ ID NO: 167 - protein, 218 aa, Homo sapiens
MATRSPGVVISDDEPGYDLDLFCIPNHYAEDLERVFIPHGLIMDRTERLARDVMKEMGGHHIVALCVLKGGYKFFADLLDYIKALNRNSDRSIPMTVDFIRLKSYCNDQSTGDIKVIGGDDLSTLTGKNVLIVEDIIDTGKTMQTLLSLVRQYNPKMVKVASLLVKRTPRSVGYKPDFVGFEIPDKFVVGYALDYNEYFRDLNHVCVISETGKAKYKA

SEQ ID NO: 168 - protein, 375 aa, Homo sapiens
MDDDIAALVVDNGSGMCKAGFAGDDAPRAVFPSIVGRPRHQGVMVGMGQKDSYVGDEAQSKRGILTLKYPIEHGIVTNWDDMEKIWHHTFYNELRVAPEEHPVLLTEAPLNPKANREKMTQIMFETFNTPAMYVAIQAVLSLYASGRTTGIVMDSGDGVTHTVPIYEGYALPHAILRLDLAGRDLTDYLMKILTERGYSFTTTAEREIVRDIKEKLCYVALDFEQEMATAASSSSLEKSYELPDGQVITIGNERFRCPEALFQPSFLGMESCGIHETTFNSIMKCDVDIRKDLYANTVLSGGTTMYPGIADRMQKEITALAPSTMKIKIIAPPERKYSVWIGGSILASLSTFQQMWISKQEYDESGPSIVHRKCF

SEQ ID NO: 169 - protein, 317 aa, Homo sapiens
MPREDRATWKSNYFLKIIQLLDDYPKCFIVGADNVGSKQMQQIRMSLRGKAVVLMGKNTMMRKAIRGHLENNPALEKLLPHIRGNVGFVFTKEDLTEIRDMLLANKVPAAARAGAIAPCEVTVPAQNTGLGPEKTSFFQALGITTKISRGTIEILSDVQLIKTGDKVGASEATLLNMLNISPFSFGLVIQQVFDNGSIYNPEVLDITEETLHSRFLEGVRNVASVCLQIGYPTVASVPHSIINGYKRVLALSVETDYTFPLAEKVKAFLADPSAFVAAAPVAAATTAAPAAAAAPAKVEAKEESEESDEDMGFGLFD

SEQ ID NO: 170 - protein, 317 aa, Homo sapiens; identical to SEQ ID NO: 169

SEQ ID NO: 171 - protein, 1970 aa, Homo sapiens
MHGGGPPSGDSACPLRTIKRVQFGVLSPDELKRMSVTEGGIKYPETTEGGRPKLGGLMDPRQGVIERTGRCQTCAGNMTECPGHFGHIELAKPVFHVGFLVKTMKVLRCVCFFCSKLLVDSNNPKIKDILAKSKGQPKKRLTHVYDLCKGKNICEGGEEMDNKFGVEQPEGDEDLTKEKGHGGCGRYQPRIRRSGLELYAEWKHVNEDSQEKKILLSPERVHEIFKRISDEECFVLGMEPRYARPEWMIVTVLPVPPLSVRPAVVMQGSARNQDDLTHKLADIVKINNQLRRNEQNGAAAHVIAEDVKLLQFHVATMVDNELPGLPRAMQKSGRPLKSLKQRLKGKEGRVRGNLMGKRVDFSARTVITPDPNLSIDQVGVPRSIAANMTFAEIVTPFNIDRLQELVRRGNSQYPGAKYIIRDNGDRIDLRFHPKPSDLHLQTGYKVERHMCDGDIVIFNRQPTLHKMSMMGHRVRILPWSTFRLNLSVTTPYNADFDGDEMNLHLPQSLETRAEIQELAMVPRMIVTPQSNRPVMGIVQDTLTAVRKFTKRDVFLERGEVMNLLMFLSTWDGKVPQPAILKPRPLWTGKQIFSLIIPGHINCIRTHSTHPDDEDSGPYKHISPGDTKVVVENGELIMGILCKKSLGTSAGSLVHISYLEMGHDITRLFYSNIQTVINNWLLIEGHTIGIGDSIADSKTYQDIQNTIKKAKQDVIEVIEKAHNNELEPTPGNTLRQTFENQVNRILNDARDKTGSSAQKSLSEYNNFKSMVVSGAKGSKINISQVIAVVGQQNVEGKRIPFGFKHRTLPHFIKDDYGPESRGFVENSYLAGLTPTEFFFHAMGGREGLIDTAVKTAETGYIQRRLIKSMESVMVKYDATVRNSINQVVQLRYGEDGLAGESVEFQNLATLKPSNKAFEKKFRFDYTNERALRRTLQEDLVKDVLSNAHIQNELEREFERMREDREVLRVIFPTGDSKVVLPCNLLRMIWNAQKIFHINPRLPSDLHPIKVVEGVKELSKKLVIVNGDDPLSRQAQENATLLFNIHLRSTLCSRRMAEEFRLSGEAFDWLLGEIESKFNQAIAHPGEMVGALAAQSLGEPATQMTLNTFHYAGVSAKNVTLGVPRLKELINISKKPKTPSLTVFLLGQSARDAERAKDILCRLEHTTLRKVTANTAIYYDPNPQSTVVAEDQEWVNVYYEMPDFDVARISPWLLRVELDRKHMTDRKLTMEQIAEKINAGFGDDLNCIFNDDNAEKLVLRIRIMNSDENKMQEEEEVVDKMDDDVFLRCIESNMLTDMTLQGIEQISKVYMHLPQTDNKKKIIITEDGEFKALQEWILETDGVSLMRVLSEKDVDPVRTTSNDIVEIFTVLGIEAVRKALERELYHVISFDGSYVNYRHLALLCDTMTCRGHLMAITRHGVNRQDTGPLMKCSFEETVDVLMEAAAHGESDPMKGVSENIMLGQLAPAGTGCFDLLLDAEKCKYGMEIPTNIPGLGAAGPTGMFFGSAPSPMGGISPAMTPWNQGATPAYGAWSPSVGSGMTPGAAGFSPSAASDASGFSPGYSPAWSPTPGSPGSPGPSSPYIPSPGGAMSPSYSPTSPAYEPRSPGGYTPQSPSYSPTSPSYSPTSPSYSPTSPNYSPTSPSYSPTSPSYSPTSPSYSPTSPSYSPTSPSYSPTSPSYSPTSPSYSPTSPSYSPTSPSYSPTSPSYSPTSPSYSPTSPSYSPTSPSYSPTSPSYSPTSPSYSPTSPNYSPTSPNYTPTSPSYSPTSPSYSPTSPNYTPTSPNYSPTSPSYSPTSPSYSPTSPSYSPSSPRYTPQSPTYTPSSPSYSPSSPSYSPTSPKYTPTSPSYSPSSPEYTPTSPKYSPTSPKYSPTSPKYSPTSPTYSPTTPKYSPTSPTYSPTSPVYTPTSPKYSPTSPTYSPTSPKYSPTSPTYSPTSPKGSTYSPTSPGYSPTSPTYSLTSPAISPDDSDEEN

SEQ ID NO: 172 - protein, 119 aa, Homo sapiens
MSRSVALAVLALLSLSGLEAIQRTPKIQVYSRHPAENGKSNFLNCYVSGFHPSDIEVDLLKNGERIEKVEHSDLSFSKDWSFYLLYYTEFTPTEKDEYACRVNHVTLSQPKIVKWDRDM

SEQ ID NO: 173 - protein, 1188 aa, Homo sapiens
MSVACVLKRKAVLWQDSFSPHLKHHPQEPANPNMPVVLTSGTGSQAQPQPAANQALAAGTHSSPVPGSIGVAGRSQDDAMVDYFFQRQHGEQLGGGGSGGGGYNNSKHRWPTGDNIHAEHQVRSMDELNHDFQALALEGRAMGEQLLPGKKFWETDESSKDGPKGIFLGDQWRDSAWGTSDHSVSQPIMVQRRPGQSFHVNSEVNSVLSPRSESGGLGVSMVEYVLSSSPGDSCLRKGGFGPRDADSDENDKGEKKNKGTFDGDKLGDLKEEGDVMDKTNGLPVQNGIDADVKDFSRTPGNCQNSANEVDLLGPNQNGSEGLAQLTSTNGAKPVEDFSNMESQSVPLDPMEHVGMEPLQFDYSGTQVPVDSAAATVGLFDYNSQQQLFQRPNALAVQQLTAAQQQQYALAAAHQPHIGLAPAAFVPNPYIISAAPPGTDPYTAGLAAAATLGPAVVPHQYYGVTPWGVYPASLFQQQAAAAAAATNSANQQTTPQAQQGQQQVLRGGASQRPLTPNQNQQGQQTDPLVAAAAVNSALAFGQGLAAGMPGYPVLAPAAYYDQTGALVVNAGARNGLGAPVRLVAPAPVIISSSAAQAAVAAAAASANGAAGGLAGTTNGPFRPLGTQQPQPQPQQQPNNNLASSSFYGNNSLNSNSQSSSLFSQGSAQPANTSLGFGSSSSLGATLGSALGGFGTAVANSNTGSGSRRDSLTGSSDLYKRTSSSLTPIGHSFYNGLSFSSSPGPVGMPLPSQGPGHSQTPPPSLSSHGSSSSLNLGGLTNGSGRYISAAPGAEAKYRSASSASSLFSPSSTLFSSSRLRYGMSDVMPSGRSRLLEDFRNNRYPNLQLREIAGHIMEFSQDQHGSRFIQLKLERATPAERQLVFNEILQAAYQLMVDVFGNYVIQKFFEFGSLEQKLALAERIRGHVLSLALQMYGCRVIQKALEFIPSDQQVINEMVRELDGHVLKCVKDQNGNHVVQKCIECVQPQSLQFIIDAFKGQVFALSTHPYGCRVIQRILEHCLPDQTLPILEELHQHTEQLVQDQYGNYVIQHVLEHGRPEDKSKIVAEIRGNVLVLSQHKFASNVVEKCVTHASRTERAVLIDEVCTMNDGPHSALYTMMKDQYANYVVQKMIDVAEPGQRKIVMHKIRPHIATLRKYTYGKHILAKLEKYYMKNGVDLGPICGPPNGII

SEQ ID NO: 174 - protein, 1186 aa, Homo sapiens
MSVACVLKRKAVLWQDSFSPHLKHHPQEPANPNMPVVLTSGTGSQAQPQPAANQALAAGTHSSPVPGSIGVAGRSQDDAMVDYFFQRQHGEQLGGGGSGGGGYNNSKHRWPTGDNIHAEHQVRSMDELNHDFQALALEGRAMGEQLLPGKKFWETDESSKDGPKGIFLGDQWRDSAWGTSDHSVSQPIMVQRRPGQSFHVNSEVNSVLSPRSESGGLGVSMVEYVLSSSPGDSCLRKGGFGPRDADSDENDKGEKKNKGTFDGDKLGDLKEEGDVMDKTNGLPVQNGIDADVKDFSRTPGNCQNSANEVDLLGPNQNGSEGLAQLTSTNGAKPVEDFSNMESQSVPLDPMEHVGMEPLQFDYSGTQVPVDSAAATVGLFDYNSQQQLFQRPNALAVQQLTAAQQQQYALAAAHQPHIGLAPAAFVPNPYIISAAPPGTDPYTAGLAAAATLGPAVVPHQYYGVTPWGVYPASLFQQQAAAAAAATNSANQQTTPQAQQGQQQVLRGGASQRPLTPNQNQQGQQTDPLVAAAAVNSALAFGQGLAAGMPGYPVLAPAAYYDQTGALVVNAGARNGLGAPVRLVAPAPVIISSSAAQAAVAAAAASANGAAGGLAGTTNGPFRPLGTQQPQPQPQQQPNNNLASSSFYGNNSLNSNSQSSSLFSQGSAQPANTSLGFGSSSSLGATLGSALGGFGTAVANSNTGSGSRRDSLTGSSDLYKRTSSSLTPIGHSFYNGLSFSSSPGPVGMPLPSQGPGHSQTPPPSLSSHGSSSSLNLGGLTNGSGRYISAAPGAEAKYRSASSASSLFSPSSTLFSSSRLRYGMSDVMPSGRSRLLEDFRNNRYPNLQLREIAGHIMEFSQDQHGSRFIQLKLERATPAERQLVFNEILQAAYQLMVDVFGNYVIQKFFEFGSLEQKLALAERIRGHVLSLALQMYGCRVIQKALEFIPSDQQNEMVRELDGHVLKCVKDQNGNHVVQKCIECVQPQSLQFIIDAFKGQVFALSTHPYGCRVIQRILEHCLPDQTLPILEELHQHTEQLVQDQYGNYVIQHVLEHGRPEDKSKIVAEIRGNVLVLSQHKFASNVVEKCVTHASRTERAVLIDEVCTMNDGPHSALYTMMKDQYANYVVQKMIDVAEPGQRKIVMHKIRPHIATLRKYTYGKHILAKLEKYYMKNGVDLGPICGPPNGII

SEQ ID NO: 175 - protein, 451 aa, Homo sapiens [sequence omitted]

SEQ ID NO: 176 - protein, 640 aa, Homo sapiens
MESVVRRCPFLSRVPQAFLQKAGKSLLFYAQNCPKMMEVGAKPAPRALSTAAVHYQQIKETPPASEKDKTAKAKVQQTPDGSQQSPDGTQLPSGHPLPATSQGTASKCPFLAAQMNQRGSSVFCKASLELQEDVQEMNAVRKEVAETSAGPSVVSVKTDGGDPSGLLKNFQDIMQKQRPERVSHLLQDNLPKSVSTFQYDRFFEKKIDEKKNDHTYRVFKTVNRRAHIFPMADDYSDSLITKKQVSVWCSNDYLGMSRHPRVCGAVMDTLKQHGAGAGGTRNISGTSKFHVDLERELADLHGKDAALLFSSCFVANDSTLFTLAKMMPGCEIYSDSGNHASMIQGIRNSRVPKYIFRHNDVSHLRELLQRSDPSVPKIVAFETVHSMDGAVCPLEELCDVAHEFGAITFVDEVHAVGLYGARGGGIGDRDGVMPKMDIISGTLGKAFGCVGGYIASTSSLIDTVRSYAAGFIFTTSLPPMLLAGALESVRILKSAEGRVLRRQHQRNVKLMRQMLMDAGLPVVHCPSHIIPVRVADAAKNTEVCDELMSRHNIYVQAINYPTVPRGEELLRIAPTPHHTPQMMNYFLENLLVTWKQVGLELKPHSSAECNFCRRPLHFEVMSEREKSYFSGLSKLVSAQA

SEQ ID NO: 177 - protein, 640 aa, Homo sapiens; identical to SEQ ID NO: 176

SEQ ID NO: 178 - DNA, 23 bp, Artificial Sequence
  TBP_forward primer
gccaagaagaaagtgaacatcat

SEQ ID NO: 179 - DNA, 20 bp, Artificial Sequence
  TBP_reverse primer
atagggattccgggagtcat

SEQ ID NO: 180 - DNA, 24 bp, Artificial Sequence
  TBP probe
tcagaacaacagcctgccacctta

SEQ ID NO: 181 - DNA, 24 bp, Artificial Sequence
  HPRT1_forward primer
gaggatttggaaagggtgtttatt

SEQ ID NO: 182 - DNA, 21 bp, Artificial Sequence
  HPRT1_reverse primer
acagagggctacaatgtgatg

SEQ ID NO: 183 - DNA, 26 bp, Artificial Sequence
  HPRT1 probe
acgtcttgctcgagatgtgatgaagg

SEQ ID NO: 184 - DNA, 18 bp, Artificial Sequence
  ACTB_forward primer
ccaaccgcgagaagatga

SEQ ID NO: 185 - DNA, 20 bp, Artificial Sequence
  ACTB_reverse primer
ccagaggcgtacagggatag

SEQ ID NO: 186 - DNA, 23 bp, Artificial Sequence
  ACTB probe
ccatgtacgttgctatccaggct

SEQ ID NO: 187 - DNA, 18 bp, Artificial Sequence
  RPLP0_forward primer
taaaccctgcgtggcaat

SEQ ID NO: 188 - DNA, 27 bp, Artificial Sequence
  RPLP0_reverse primer
acatttcggataatcatccaatagttg

SEQ ID NO: 189 - DNA, 24 bp, Artificial Sequence
  RPLP0 probe
aagtagttggacttccaggtcgcc

SEQ ID NO: 190 - DNA, 19 bp, Artificial Sequence
  POLR2A_forward primer
agtcctgagtccggatgaa

SEQ ID NO: 191 - DNA, 18 bp, Artificial Sequence
  POLR2A_reverse primer
cctccctcagtcgtctct

SEQ ID NO: 192 - DNA, 24 bp, Artificial Sequence
  POLR2A probe
tgacggagggtggcatcaaatacc

SEQ ID NO: 193 - DNA, 17 bp, Artificial Sequence
  B2M_forward primer
ccgtggccttagctgtg

SEQ ID NO: 194 - DNA, 21 bp, Artificial Sequence
  B2M_reverse primer
ctgctggatgacgtgagtaaa

SEQ ID NO: 195 - DNA, 24 bp, Artificial Sequence
  B2M probe
tctctctttctggcctggaggcta

SEQ ID NO: 196 - DNA, 22 bp, Artificial Sequence
  PUM1_forward primer
gccagcttgtcttcaatgaaat

SEQ ID NO: 197 - DNA, 21 bp, Artificial Sequence
  PUM1_reverse primer
caaagccagcttctgttcaag

SEQ ID NO: 198 - DNA, 24 bp, Artificial Sequence
  PUM1 probe
atccaccatgagttggtaggcagc

SEQ ID NO: 199 - DNA, 22 bp, Artificial Sequence
  K-ALPHA-1_forward primer
tgactccttcaacaccttcttc

SEQ ID NO: 200 - DNA, 18 bp, Artificial Sequence
  K-ALPHA-1_reverse primer
tgccagtgcgaacttcat

SEQ ID NO: 201 - DNA, 24 bp, Artificial Sequence
  K-ALPHA-1 probe
ccgggctgtgtttgtagacttgga

SEQ ID NO: 202 - DNA, 17 bp, Artificial Sequence
  ALAS-1_forward primer
agccacatcatccctgt

SEQ ID NO: 203 - DNA, 22 bp, Artificial Sequence
  ALAS-1_reverse primer
cgtagatgttatgtctgctcat

SEQ ID NO: 204 - DNA, 22 bp, Artificial Sequence
  ALAS-1 probe
tttagcagcatctgcaacccgc

1. A method comprising:
determining a gene expression level for the signature genes: AZGP1, FBLN1, ILK, KRT15, MEIS2, MYBPC1, PAGE4, SRD5A2, COL1A1, COL3A1, COL5A2, INHBA, THBS2, VCAN, BGN, BIRC5, and DYRK2, and optionally PDE4 isoforms comprising PDE4D5 and/or PDE4D7, to obtain a subject expression profile for a subject, and further comprising:
classifying the subject as having a good prognosis or a poor prognosis of prostate cancer based on the subject expression profile, wherein the good prognosis predicts an increased likelihood of survival within a predetermined period after initial diagnosis and/or no progression of disease after primary treatment, and the poor prognosis predicts an aggressive disease, a decreased likelihood of survival, and an increased likelihood of biochemical recurrence, clinical recurrence, and/or the presence of local or distant metastases, within a predetermined period after initial diagnosis; and/or
classifying the subject as having or not having a predisposition of prostate cancer that is susceptible to disease progression based on the subject expression profile, wherein the predisposition predicts an aggressive disease, decreased likelihood of survival, and an increased likelihood of biochemical recurrence, clinical recurrence, and/or the presence of local or distant metastases, within a predetermined period after initial diagnosis.

2. (canceled)

3. A method comprising:
classifying a subject as having a good prognosis or a poor prognosis based on a subject expression profile for the subject, wherein the subject expression profile includes the gene expression level of the signature genes: AZGP1, FBLN1, ILK, KRT15, MEIS2, MYBPC1, PAGE4, SRD5A2, COL1A1, COL3A1, COL5A2, INHBA, THBS2, VCAN, BGN, BIRC5, and DYRK2, and optionally PDE4 isoforms comprising PDE4D5 and/or PDE4D7, and wherein a good prognosis predicts an increased likelihood of survival within a predetermined period after initial diagnosis and/or no progression of disease after primary treatment, and poor prognosis predicts an aggressive disease, a decreased likelihood of survival, and an increased likelihood of biochemical recurrence, clinical recurrence, and/or the presence of local or distant metastases, within a predetermined period after initial diagnosis; and/or
classifying a subject as having or not having a predisposition of prostate cancer that is susceptible to disease progression based on a subject expression profile for the subject, wherein the subject expression profile includes the gene expression level of the signature genes: AZGP1, FBLN1, ILK, KRT15, MEIS2, MYBPC1, PAGE4, SRD5A2, COL1A1, COL3A1, COL5A2, INHBA, THBS2, VCAN, BGN, BIRC5, and DYRK2, and optionally PDE4 isoforms comprising PDE4D5 and/or PDE4D7, wherein the predisposition predicts an aggressive disease, decreased likelihood of survival, an increased likelihood of biochemical recurrence, clinical recurrence, and/or the presence of local or distant metastases, within a predetermined period after initial diagnosis.

4. The method of claim 1, wherein the subject expression profile is converted to a prostate cancer progression index.

5. The method of claim 4, wherein the prostate cancer progression index is calculated according to the following equation:
PCPI=(GEV_av_GOI_up)−(GEV_av_GOI_down),
wherein GEV av GOI up is an average gene expression value of up-regulated genes, and wherein GEV_av_GOI_down is an average gene expression value of down-regulated genes, wherein the values are determined on the basis of normalized gene expression data per each subject sample.

6. The method of claim 1, wherein the expression level of the set of the signature genes is normalized to the expression of a reference gene, preferably wherein the reference gene is a housekeeping gene, and more preferably wherein the housekeeping gene is TBP, HPRT1, ACTB, RPLP0, PUM1, POLR2A or B2M.

7. (canceled)

8. The method of claim 3,
wherein the subject is classified as having a good prognosis if the prostate cancer progression index is below a selected threshold or as having a poor prognosis if the prostate cancer progression index is above the selected threshold; and/or
wherein the subject is classified as having a predisposition of prostate cancer that is susceptible to disease progression if the prostate cancer progression index is above a selected threshold or as not having a predisposition of prostate cancer that is susceptible to disease progression if the prostate cancer progression index is below the selected threshold.

9. The method of claim 8, further comprising
stratifying the subject for the risk of aggressive disease versus non-aggressive disease according to the prognosis determined or the predisposition determined; and/or
providing a suitable cancer treatment to the subject in need thereof according to the prognosis determined or the predisposition determined.

10. The method of claim 3, wherein the poor prognosis or the predisposition of prostate cancer that is susceptible to disease progression is indicative of eligibility of the subject to be treated with any one or more of the treatments selected from the group consisting of prostate surgery, prostate removal, chemotherapy, radiotherapy, brachytherapy, limited or extended lymph node dissection, hormonal therapy.

11. Use of a product comprising:
primers and/or probes for determining the gene expression level for the signature genes: AZGP1, FBLN1, ILK, KRT15, MEIS2, MYBPC1, PAGE4, SRD5A2, COL1A1, COL3A1, COL5A2, INHBA, THBS2, VCAN, BGN, BIRC5, and DYRK2, and optionally PDE4 isoforms comprising PDE4D5 and/or PDE4D7;
optionally further comprising primers and/or probes for determining the expression levels of a set of genes listed in either FIG. 1 or 2 other than the above-mentioned genes; and/or
optionally further comprising primers and/or probes for determining the gene expression level of a reference gene, preferably wherein the reference gene is a housekeeping gene, and more preferably wherein the housekeeping gene is TBP, HPRT1, ACTB, RPLP0, PUM1, POLR2A or B2M,
for establishing a prognosis for a patient diagnosed with prostate cancer, for stratification of a patient diagnosed with prostate cancer, or for the determination of predisposition for aggressive or indolent prostate cancer in a patient having prostate cancer.

12. Use according to claim 11, wherein the product is a PCR kit, a RNA-sequencing kit, or a microarray or a microarray kit.

13. (canceled)

14. A computer program product, comprising computer readable code stored on a computer readable medium or downloadable from a communications network, which, when run on a computer, implement one or more steps of claim 1.

15. A system comprising the computer program product of claim 14 and a product comprising:
primers and/or probes for determining the gene expression level for the signature genes: AZGP1, FBLN1, ILK, KRT15, MEIS2, MYBPC1, PAGE4, SRD5A2, COL1A1, COL3A1, COL5A2, INHBA, THBS2, VCAN, BGN, BIRC5, and DYRK2, and optionally PDE4 isoforms comprising PDE4D5 and/or PDE4D7;
optionally further comprising primers and/or probes for determining the expression levels of a set of genes listed in either FIG. 1 or 2 other than the above-mentioned genes; and/or
optionally further comprising primers and/or probes for determining the gene expression level of a reference gene, preferably wherein the reference gene is a housekeeping gene, and more preferably wherein the housekeeping gene is TBP, HPRT1, ACTB, RPLP0, PUM1, POLR2A or B2M.

16. The system of claim 15, wherein the product is a PCR kit, a RNA-sequencing kit, or a microarray or a microarray kit.
